(19) United States
(12) Patent Application Publication
(10) Pub. No.: US 2014/0023683 A1
(43) Pub. Date: Jan. 23, 2014

(54) IDENTIFICATION OF TRANSMITTED HEPATITIS C VIRUS (HCV) GENOMES BY SINGLE GENOME AMPLIFICATION

(71) Applicants: George M. Shaw, Birmingham, AL (US); Hui Li, Birmingham, AL (US); Beatrice H. Hahn, Birmingham, AL (US); Barton F. Haynes, Durham, NC (US)

(72) Inventors: George M. Shaw, Birmingham, AL (US); Hui Li, Birmingham, AL (US); Beatrice H. Hahn, Birmingham, AL (US); Barton F. Haynes, Durham, NC (US)

(73) Assignees: THE UAB RESEARCH FOUNDATION, Birmingham, AL (US); DUKE UNIVERSITY, Durham, NC (US)

(21) Appl. No.: 13/821,886

(22) PCT Filed: Sep. 8, 2011
(86) PCT No.: PCT/US11/50807

§ 371 Date: Oct. 9, 2013

Related U.S. Application Data
(60) Provisional application No. 61/380,997, filed on Sep. 8, 2010.

(51) Int. Cl. C12Q 1/70; A61K 39/29

(52) U.S. Cl. CPC C12Q 1/707; A61K 39/29
USPC 424/228.1; 435/5; 536/23.72

(57) ABSTRACT

This invention provides methods for identifying HCV genomes and more specifically, methods for identifying nucleotide sequence of viral structural proteins at the time of HCV viral transmission. The method of the invention utilizes single genome amplification and sequencing of circulating virus as well as phylogenetic analysis of the resulting nucleotide sequence for identifying transmitted HCV genomes. Also provided are HCV genomes and corresponding nucleotide sequence for transmitted and circulating HCV virus. The invention further provides methods of administering a vaccine comprising one or more identified transmitted HCV sequences.

### FIELD OF THE INVENTION

[0001] The invention provides methods for identifying hepatitis C virus (HCV) genomes that mediate viral transmission and clinical infection. More particularly, the invention provides nucleotide sequences corresponding to specific transmitted HCV genomes, including structural gene nucleotide sequences of global HCV genotypes, subtypes, and drug resistant variants that actively mediate viral infection. The invention further provides methods of administering a vaccine comprising one or more identified HCV sequences.

### BACKGROUND OF THE INVENTION

[0002] HCV transmission in humans results most commonly from percutaneous inoculations or exposures at mucosal surfaces (Lindenbach, B. D. et al., 2005, Science 309:623-626; Moradpour, D. et al., 2007, Nat Rev Microbiol 5:453-463; Ray, S. C. et al., 2010, Mandell, Douglas, and Bennett's Principles and Practice of Infectious Diseases, Churchill Livingstone Elsevier, Philadelphia, vol, 2:2157-2185; Strickland, G. T. et al., 2008, Lancet Infect Dis 8:379-386; Tohme, R. A. et al., 2010, Hepatology (pre-print Epub:DOI:10.1002/hep.23808)). Experimentally, it has not been possible to identify and characterize by direct analytical methods HCV at or near the moment of transmission, yet it is this virus that antibody or cell-based vaccines, antiviral drugs, and the natural immune responses should interdict (Strickland, G. T. et al., 2008, Lancet Infect Dis 8:379-386; Bowen, D. G. et al., 2005, Nature 436:946-952; Cox, A. L. et al., 2005, J Exp Med 201:1741-1752; Kuntzen, T. et al., 2007, J Virol 81:11658-11668; Liu, C. H. et al., 2006, Clin Infect Dis 42:1254-1259; Liu, L. et al., 2010, J Virol 84:5067-5077). An important step in achieving a molecular understanding of HCV transmission and for improved development of effective HCV vaccines and drugs is an accurate and precise description of the transmitted virus (or viruses) and sequences evolving from them during the critical period leading to productive clinical infection and thereafter.

[0003] Previous reports examined the molecular basis of HCV transmission by analyzing the genetic composition of viruses sampled between one and six months following infection (Strickland, G. T. et al., 2008, Lancet Infect Dis 8:379-386; Bowen, D. G. et al., 2005, Nature 436:946-952; Cox, A. L. et al., 2005, J Exp Med 201:1741-1752; Kuntzen, T. et al., 2007, J Virol 81:11658-11668; Liu, C. H. et al., 2006, Clin Infect Dis 42:1254-1259; Liu, L. et al., 2010, J Virol 84:5067-5077). A common methodological approach in these studies was to derive viral sequences from the plasma of patients by bulk or near-limiting dilution polymerase chain reaction (PCR) amplification of viral nucleic acid (viral RNA, vRNA), followed by cloning, sequencing, and phylogenetic analysis. Alternatively, bulk amplified viral nucleic acids were analyzed by 454 deep sequencing where only a small fraction of the gene of interest is interrogated (Wang, G. P. et al., 2010, J Virol 84:6218-6228). While these approaches provide an approximation of the complexity of virus populations in acute and early infection, they have significant limitations. 454 deep sequencing, for example, provides sequence information for only short regions of the genome and has a significant polymerase error rate, and as a consequence allows for only qualitative inferences regarding the genetic identity and complexity of virus populations. Bulk or near-endpoint PCR followed by cloning and sequencing is compromised by the introduction of Taq polymerase errors (Palmer, S. et al., 2005, J Clin Microbiol 43:406-413; Salazar-Gonzalez, J. F. et al., 2008, J Virol 82:3952-3970; Simmonds, P. et al., 1990, J Virol 64:5840-5850), Taq polymerase-mediated template switching (recombination) (Salazar-Gonzalez, J. F. et al., 2008, J Virol 82:3952-3970; Meyerhans, A. et al., 1990, Nucleic Acids Res 18:1687-1691; Shriner, D. et al., 2004, Genetics 167:1573-1583), and non-proportional representation of target sequences due to template re-sampling or unequal template amplification and cloning (Palmer, S. et al., 2005, J Clin Microbiol 43:406-413; Salazar-Gonzalez, J. F. et al., 2008, J Virol 82:3952-3970; Simmonds, P. et al., 1990, J Virol 64:5840-5850; Liu, S. L. et al., 1996, Science 273:415-416).

[0004] Based largely on these approaches, previous studies generally described the HCV virus quasispecies in acute and early infection either as relatively “homogeneous,” reflecting transmission of one or few viruses, or relatively “heterogeneous,” reflecting a higher multiplicity of infection. Interestingly, there were parallels between the sequence analysis of HIV-1 and HCV in acute and early infection (Derdeyn, C. A. et al., 2004, Science 303:2019-2022; Frost, S. D. et al., 2005, Proc Natl Acad Sci USA 102:18514-18519; Grobler, J. et al., 2004, J Infect Dis 190:1355-1359; Learn, G. H. et al., 2002, J Virol 76:11953-11959; Long, E. M. et al., 2000, Nat Med 6:71-75; Poss, M. et al., 1995, J Virol 69:8118-8122; Ritola, K. et al., 2004, J Virol 78:11208-11218; Sagar, M. et al., 2004, J Virol 78:7279-7283; Wolfs, T. F. et al., 1992, Virology 189:103-110; Wolinsky, S. M. et al., 1992, Science 255:1134-1137; Zhu, T. et al., 1993, Science 261:1179-1181), but it was not until the development of single genome amplification (SGA)-direct amplicon sequencing that the true nature of the bottleneck to HIV-1 transmission was elucidated (Salazar-Gonzalez, J. F. et al., 2008, J Virol 82:3952-3970; Abrahams, M. R. et al., 2009, J Virol 83:3556-3567; Bar, K. J. et al., 2010, J Virol 84:6241-6247; Haaland, R. E. et al., 2009, PLoS Pathog 5:e1000274; Keele, B. F. et al., 2008, Proc Natl Acad Sci USA 105:7552-7557; Keele, B. F. et al., 2009, J Exp Me, 206:1117-1134; Li, H. et al., 2010, PLoS Pathog 6:e1000890; Salazar-Gonzalez, J. F. et al., 2009, J Exp Med 206:1273-1289). Additionally, an independent obstacle for identifying the transmitted HCV genome is the greater variance in the genome as compared to HIV-1.

[0005] Prior studies characterized HCV sequences in acute and early infection using methods that did not involve SGA and direct sequencing, and as a result, they did not allow for precise identification or enumeration of transmitted or early founder viruses, their pathways of diversification as genetic units, or their corresponding phenotypes (Strickland, G. T. et al., 2008, Lancet Infect Dis 8:379-386; Bowen, D. G. et al., 2005, Nature 436:946-952; Cox, A. L. et al., 2005, J Exp Med 201:1741-1752; Kuntzen, T. et al., 2007, J Virol 81:11658-11668; Liu, C. H. et al., 2006, Clin Infect Dis 42:1254-1259; Liu, L. et al., 2010, J Virol 84:5067-5077). The extent to which differences in experimental approach can impact the interpretation of virus complexity was recently highlighted in a study of acute and early HIV-1 subtype C infection (Salazar-Gonzalez, J. F. et al., 2008, J Virol 82:3952-3970) and was seen again in a study in 10 subjects with acute HIV-1 infection who had been analyzed previously by the heteroduplex tracking assay (HTA) method (Ritola, K. et al., 2004, J Virol 78:11208-11218), and for HCV, it was illustrated by 454 deep sequencing (Wang, G. P. et al., 2010, J Virol 84:6218-6228).

[0006] Thus, there is a need in the art to develop methods for accurately identifying HCV genome sequences in order to gain a more comprehensive molecular understanding of HCV transmission and for development of effective HCV vaccines and treatments. The present invention provides a novel method based on SGA, direct amplicon sequencing without an interim cloning step, and phylogenetic analysis of sequences with the context of a mathematical model of random virus evolution.

### SUMMARY OF THE INVENTION

[0007] The invention provides methods for identifying HCV genomes of transmitted HCV virus (i.e., HCV virus that mediates infection). In the practice of the methods of the invention, improved nucleotide sequence analysis of circulating HCV genomes is utilized for accurate identification of HCV nucleotide sequence. Subsequent phylogenetic analysis by a novel mathematical model disclosed herein provides a means for identifying actual HCV genome nucleotide sequence of transmitted HCV virus. One application of this invention is thus to identify transmitted HCV sequences that mediate viral infection for subsequent development of more effective vaccines and treatments.

[0008] More specifically, the invention provides a methods for identifying transmitted HCV genomes, the methods comprising collecting circulating HCV from infected patients, isolating and preparing viral RNA for sequencing, sequencing HCV according to the improved methods provided herein, and performing phylogenetic analysis of said circulating sequences according to mathematical models provided herein to identify actual nucleotide sequence of transmitted HCV virus. In certain embodiments, sequencing of HCV genomes is performed by single genome amplification followed by population sequencing of the DNA amplicons without an interim molecular cloning step. In other embodiments, phylogenetic analysis is performed by a novel mathematical model and/or by alternative phylogenetic methods as described in detail in the Examples below. Ultimately, the methods provide transmitted HCV genomes and nucleotide sequence that are involved in mediating viral infection. In certain embodiments, these sequences include but are not limited to structural proteins and more specifically env and core gene sequences.

[0009] The method of the invention further provides for the identification of HCV nucleotide sequence variance over time. Hence, the invention permits evolutionary assessment of transmitted HCV. Such methods are beneficial for the development of vaccines specific to variant polynucleotide and peptide regions of HCV.

[0010] The invention provides HCV genomes of transmitted virus (i.e., the nucleotide sequence at the time of viral transmission). In certain embodiments, the polynucleotides of the invention comprise genes encoding HCV structural proteins, including but not limited to env and core genes. Nucleotide sequence of transmitted HCV genomes is set forth in Table I (Appendix A). In additional embodiments, identified transmitted HCV genomes correspond to HCV transmitted in humans, chimpanzees, and other animal models.

[0011] In certain embodiments, the invention provides 5′ half-genome HCV sequence and/or full-length genome HCV sequence. More particularly, the invention provides nucleotide sequence comprising one or a plurality of the polynucleotides as set forth in Table I and the Sequence Listing submitted herewith. below. In certain embodiments, the polynucleotides of the invention comprise HCV genes encoding structural proteins, including but not limited to env and core genes. In certain embodiments, the HCV genomes comprise the six global genotypes, subtypes, or drug resistant variants. In additional embodiments, the nucleotide sequences include those identified from circulating HCV virus in addition to nucleotide sequences identified from transmitted HCV virus.

[0012] In other aspects, the invention provides methods for producing and administering vaccines comprising HCV nucleotide sequence identified by methods provided herein and/or polypeptides encoded by HCV nucleotide sequence. The advantages of administering the disclosed HCV sequences and/or polypeptides encoded by such HCV sequences is such vaccines would illicit an immune response that is specific to transmitted HCV genomes rather than circulating HCV genomes, thereby improving vaccine effectiveness.

[0013] Advantages of this invention include, inter alia, that it permits the identification of HCV genomes of transmitted virus. Prior to this invention actual nucleotide sequence of transmitted HCV genomes was not known due to insufficient methods for error-free sequencing and genetic analysis. The studies disclosed herein illustrate that SGA-direct sequencing unambiguously identifies transmitted viral sequences, which provided a means to characterize core, envelope and full-length HCV genomes and proteins most relevant to virus transmission and in turn, drug and vaccine development. The studies provided in the Examples below provide an understanding of virus natural history and virus-specific cellular and humoral immune responses in naïve and vaccinated individuals.

[0014] Specific embodiments of this invention will become evident from the following more detailed description of certain preferred embodiments and the claims.

### BRIEF DESCRIPTION OF THE DRAWINGS

[0015] These and other objects and features of this invention will be better understood from the following detailed description taken in conjunction with the drawings, wherein:

[0016] FIG. 1 is a schematic representing HCV genome organization. The location of 4.9 kb 5′ half-genome amplicons generated and sequenced herein are at shown bottom left.

[0017] FIG. 2 is a schematic representing global HCV genome diversity. The scale bar represents 0.05, or 5%, nucleotide differences between sequences.

[0018] FIG. 3 illustrates 5′ half-genome sequence diversity in an acutely-infected subject (10025) productively infected by a single virus. Neighbor-joining phylogenetic tree and a Highlighter plot are shown in the left and right parts of the figure, respectively. The scale bar represents 0.0002, or 1 nucleotide difference between sequences.

[0019] FIG. 4 illustrates 5′ half-genome sequence diversity in an acutely-infected subject (10024) productively infected by two viruses. Neighbor-joining phylogenetic tree and a Highlighter plot are shown in the left and right parts of the figure, respectively. The scale bar represents 0.002, or 10 nucleotide differences between sequences.

[0020] FIG. 5 illustrates 5′ half-genome sequence diversity in an acutely-infected subject (10021) productively infected by a single virus. Neighbor-joining phylogenetic tree and a Highlighter plot are shown in the left and right parts of the figure, respectively. The scale bar represents 0.0002, or 1 nucleotide difference between sequences. Sequences were derived from plasma sampled over time: Sep. 13, 1998 (gray) and Oct. 4, 1998 (black).

[0021] FIG. 6 illustrates 5′ half-genome sequence diversity in an acutely-infected subject (10012) productively infected by three viruses. Neighbor-joining phylogenetic tree and a Highlighter plot are shown in the left and right parts of the figure, respectively. The scale bar represents 0.001, or 5 nucleotide differences between sequences. Sequences were derived from plasma sampled over time: Mar. 17, 1998 (light gray) and Mar. 24, 1998 (dark gray) and 4/5/98 (black).

[0022] FIG. 7 illustrates 5′ half-genome sequence diversity in an acutely-infected subject (10029) productively infected by at least eight viruses. Neighbor-joining phylogenetic tree and a Highlighter plot are shown in the left and right parts of the figure, respectively. The scale bar represents 0.002, or 10 nucleotide differences between sequences. Sequences were derived from plasma sampled over time: May 30, 1998 (light gray) and Jun. 14, 1998 (dark gray) and Jun. 28, 1998 (black).

[0023] FIG. 8 illustrates 5′ half-genome sequence diversity in an acutely-infected subject (10020) productively infected by more than two viruses. Neighbor-joining phylogenetic tree and a Highlighter plot are shown in the left and right parts of the figure, respectively. The scale bar represents 0.0002, or 1 nucleotide difference between sequences. Sequences were derived from plasma sampled on Sep. 27, 1998 (gray) and Oct. 22, 1998 (black).

[0024] FIG. 9 illustrates 5′ half-genome sequence diversity in a chronically-infected subject (JOTO6642). Neighbor-joining phylogenetic tree and a Highlighter plot are shown in the left and right parts of the figure, respectively. The amplified and sequenced region of the genome is represented at the bottom of the figure. The scale bar represents 0.002, or 10 nucleotides difference between sequences.

[0025] FIG. 10 illustrates 5′ half-genome sequence diversity in a chronically-infected subject (WHRO3382). Neighbor-joining phylogenetic tree and a Highlighter plot are shown in the left and right parts of the figure. The scale bar represents 0.001, or 5 nucleotides difference between sequences.

### DETAILED DESCRIPTION OF THE PREFERRED EMBODIMENTS

[0026] The invention provides methods for identifying HCV genomes that mediate viral infection and transmission. More particularly, the methods provide a means for identifying specific nucleotide sequences of transmitted HCV virus, which prior to the present invention were unavailable due to the following: (i) a significant time period from weeks to months between the moment of transmission and the first appearance of HCV in the blood (Bowen. D. G. and Walker, C. M., 2005, Nature 436: 946-952; Moradpour, D. et al., 2007, Nature Rev Micro 5:453-463); (ii) HCV is genetically highly variable in its nucleotide sequence due to its error-prone RNA-dependent RNA polymerase, and as a result, it exists in individuals as a complex mixture of sequences commonly referred to as a ‘quasispecies’ (Moradpour, D. et al., 2007, Nature Rev Micro 5:453-463); (iii) conventional experimental approaches to sequencing the HCV genome from clinical samples introduced addition variation into the sequences as a consequence of Taq polymerase induced recombination and nucleotide misincorporation errors (Salazar-Gonzalez, J. F. et al., 2008, J Virol 82:3952-3970); and (iv) identifying from these myriad of sequences which sequences corresponded to actual transmitted viruses, or even viruses that were replication-competent and responsible for ongoing virus replication and persistence in the infected subject was not achievable. The identification of transmitted viral sequence provides specific nucleotide and protein regions responsible for mediating viral infection. Utilizing these specific regions in the preparation of vaccines and therapeutic provides for more effective HCV treatments.

[0027] In one embodiment, the methods comprise: (a) collecting a patient sample; (b) isolating viral RNA from said sample; (c) sequencing said viral RNA, wherein viral RNA sequencing includes HCV genomes of circulating virus; (d) performing sequence alignment of selected HCV genome regions; (e) analyzing phylogenetically selected sequence alignments; and (f) identifying HCV genomes of transmitted virus. In a further embodiment, the method comprises the additional step (g) detecting the variation in transmitted viral sequence over time, wherein variations in said viral sequences are identified.

[0028] The invention is not limited to the identification of transmitted viral genomes, but also includes the identification of circulating viral genomes. The sequence analysis of circulating HCV genomes provides raw data for subsequent phylogenetic analysis. For example, see SEQ ID NOS: 23-757. While the identification of transmitted HCV genomes is a preferred embodiment, the invention is not limited to that example.

[0029] As used herein, a “patient” or “subject” to be utilized by the disclosed methods can mean a human, chimpanzee or non-human primate. In certain embodiments the patient is a non-human mammal.

[0030] The term “patient sample” as used herein includes but is not limited to a blood, serum, plasma, or urine sample obtained from a patient. In particular embodiments, the patient sample is plasma. In a preferred embodiment, the patient is infected with HCV.

[0031] The phrase “performing phylogenetic analysis” as used herein represents the analysis of clinical viral isolates, regardless of the particular methodology employed. Comparative analysis of the genetic relatedness of any a collection of circulating viral isolates is used to select for nucleotide sequence of transmitted HCV genomes. This methodology is used to select for the actual HCV genomes present at the time of patient infection/viral transmission. This can be accomplished by any number of methods, including but not limited to: i) a novel mathematical model of random virus evolution disclosed herein; ii) star phylogeny; iii) Baysian analysis; or any other method of phylogenetic analysis known to one of skill in the art.

[0032] The phrase “performing sequence alignment” as used herein is meant to include aligning genetic sequences by any of a number of different procedures that produce a sufficient match between the corresponding residue in the sequences. Typically, Smith-Waterman or Needleman-Wunsch algorithms are used. However, other procedures such as BLAST, FASTA, PSI-BLAST can be used. In certain embodiments manual alignment (i.e., performed by a technician reading the actual sequence and selected the alignment) is performed.

[0033] The phrase “isolating viral RNA” as used herein includes those methods well known in the art for extraction of viral RNA from a sample, cDNA synthesis from viral RNA template, optionally cloning of cDNA fragments, and/or amplification of polynucleotide sequence. Such methods are described in more detail, but such experimental procedures are provided in Sambrook and Russell, 2001, Molecular Cloning: A Laboratory Manual, Third Ed., Cold Spring Harbor Laboratory Press, Woodbury, N.Y.

[0034] The practice of this invention can involve procedures well known in the art, including for example nucleotide sequence amplification, such as polymerase chain reaction (PCR) and modifications thereof (including for example reverse transcription (RT)-PCR, and stem-loop PCR), as well as reverse transcription and in vitro transcription. Generally these methods utilize one or a pair of oligonucleotide primers having sequence complimentary to sequences 5′ and 3′ to the sequence of interest, and in the use of these primers they are hybridized to a nucleotide sequence and extended during the practice of PCR amplification using DNA polymerase (preferably using a thermal-stable polymerase such as Taq polymerase). RT-PCR may be performed on miRNA or mRNA with a specific 5′ primer or random primers and appropriate reverse transcription enzymes such as avian (AMV-RT) or murine (MMLV-RT) reverse transcriptase enzymes.

[0035] In a preferred embodiment, methods of the invention utilize single genome amplification (SGA) for improved sequence accuracy instead of the traditional cloning and amplification methods described immediately above. Details of this method are provided in Example 3, B. Keele et al., 2008, Proc Natl Acad Sci USA 105:7552-57; and Salazar-Gonzalez et al., 2009, J Exp Med 206: 1273-1289. Advantages of SGA are described herein, and include reduced error rate. SGA followed by direct sequencing of uncloned amplicon DNA mitigates Taq polymerase nucleotide misincorporation, thereby resulting in nucleotide sequence that more closely relates to the original viral RNA template.

[0036] The phrase “over time” as used herein represents a period of time between the collection of patient samples. For example, a patient sample is collected at time point A and then subsequently as a later date at time point B. The period between samplings is over time. In certain embodiments, samples are taken from the same patient. In alternative embodiments, samples may be taken from different patients. Performing the method of the invention at different time points followed by the differential analysis of HCV genomes at the different time points provides a means for assessing the evolution of HCV genomes both inter- and intra-patient. The identification of highly variable genomic regions is useful for the generation of effective therapeutics and vaccines to HCV.

[0037] The term “transmitted” as used herein refers to viral genotype and phenotype at the time of viral infection. The term “transmitted virus” as used here is in reference to actual HCV virus that mediates patient infection. The phrase “transmitted viral sequence” as used herein is meant to include nucleotide or amino acid sequence of HCV genomes of transmitted virus. The term “circulating” refers to HCV virus collected from patient post-infection. In general, patient samples comprise circulating virus because HCV infection has occurred at a prior time point. The half-life of plasma virus is less than 1 day, thus the collection of transmitted virus from a patient sample would be a rare event.

[0038] The term “selected” as used in the phrases “selected sequence alignments” or “selected HCV genome regions” is meant to include the identification and utilization of particular subsets of nucleotide sequence and/or genome regions for subsequent analysis. In certain embodiments, full-length HCV genomes are identified, however discrete portions of the genome are utilized or “selected” for further analysis.

[0039] In one embodiment, the full-length HCV genome of transmitted virus is identified by the methods of the invention. In another embodiment, half-genomes of transmitted and circulating HCV are identified. In certain embodiments, the regions corresponding to HCV structural genes, including env and core genes are identified. See Table I and Sequence Listing (SEQ ID NOS: 1-757).

[0040] The invention also includes polynucleotide sequences identified by the methods disclosed herein. Transmitted HCV sequences are provided in Table I. A further embodiment of the invention includes polypeptides encoded by the polynucleotides of Table I. The polynucleotide and polypeptides of transmitted HCV provide the basis for effective vaccine development.

[0041] The present invention also provides vaccine compositions and methods for delivery of HCV polynucleotide or polypeptide sequences to a vertebrate with optimal expression and safety conferred. These vaccine compositions may be prepared and administered in such a manner that the encoded gene products are optimally expressed in the vertebrate of interest. As a result, these compositions and methods are useful in stimulating an immune response against HCV infection. Also included in the invention are expression systems and delivery systems.

[0042] In a specific embodiment, the invention provides polynucleotide (e.g., DNA) vaccines (Wei, et al., 2010, Science 329:1060-64) as well as combinatorial vaccines which combine both a polynucleotide vaccine and polypeptide (e.g., either a recombinant protein, a purified subunit protein, a viral vector expressing an isolated HCV polypeptide, or in the form of an inactivated or attenuated HCV vaccine) vaccine in a single formulation, or polypeptide vaccines. The formulation comprises a polynucleotide, or an HCV polypeptide-encoding polynucleotide vaccine, and optionally, an effective amount of a desired isolated HCV polypeptide or fragment, variant, or derivative thereof. The polypeptide may exist in any form, for example, a recombinant protein, a purified subunit protein, a viral vector expressing an isolated HCV polypeptide, or in the form of an inactivated or attenuated HCV vaccine. The HCV polypeptide or fragment, variant, or derivative thereof encoded by the polynucleotide vaccine may be identical to the isolated HCV polypeptide or fragment, variant, or derivative thereof. Alternatively, the HCV polypeptide or fragment, variant, or derivative thereof encoded by the polynucleotide may be different from the isolated HCV polypeptide or fragment, variant, or derivative thereof.

[0043] Transmitted HCV genome components can be administered as DNA plasmids for DNA vaccination (Id.), as recombinant proteins, genes expressed in vectors including replication deficient recombinant adenovirus (Barefoot, B. et al., 2008, Vaccine 26: 6108-18), recombinant mycobacteria (Id.; Yu et al., 2007, Clinical Vaccine Immunol 14; 886-893; Yu, et al., 2006, Clinical Vaccine Immunol, 13: 1204-11, Larsen et al., 2009, Vaccine 27: 4709-17), recombinant vesicular stomatititis virus, recombinant vaccinia virus or variants thereof such as modified vaccinia Ankara (Sun et al., 2010, Virology 406: 48-55; Estaban, M., 2009, Human Vaccines 5: 867-71) or NYVAC (Estaban, M., 2009, Human Vaccines 5: 867-71). Advantageously, hepatitis C envelope genes or proteins can be used to induce neutralizing antibody responses either as proteins used alone, as DNAs or vectors used alone or in a DNA prime vector boost regimen, or as a vector prime protein boost regimen. Recombinant proteins may be used as primes and/or boosts with certain adjuvants. Adjuvants include monophosphoryl lipid A, MF59, Alum as well as various oil in water or water in oil emulsions, as examples (Mbow, et al., 2010, Current Opinion in Immunology 22: 411-416). Finally, hepatitis C envelope can be expressed as virus like particles and administered either alone or in adjuvant formulations (Qiao et al., 2003, Hepatology 37: 52-9). Administration routes include for example, intramuscularly, subcutaneously, and/or mucosally, most advantageously intranasally.

[0044] It is to be noted that the term “a” or “an” entity refers to one or more of that entity; for example, “a polynucleotide,” is understood to represent one or more polynucleotides. As such, the terms “a” (or “an”), “one or more,” and “at least one” can be used interchangeably herein.

[0045] The term “polynucleotide” is intended to encompass a singular nucleic acid or nucleic acid fragment as well as plural nucleic acids or nucleic acid fragments, and refers to an isolated molecule or construct, e.g., a virus genome (e.g., vRNA), messenger RNA (mRNA), plasmid DNA (pDNA), or derivatives of pDNA (e.g., minicircles as described in (Darquet, A-M et al., 1997, Gene Therapy, 4:1341-1349) comprising a polynucleotide. A polynucleotide may comprise a conventional phosphodiester bond or a non-conventional bond (e.g., an amide bond, such as found in peptide nucleic acids (PNA)).

[0046] The terms “nucleic acid” or “nucleic acid fragment” refer to any one or more nucleic acid segments, e.g., DNA or RNA fragments, present in a polynucleotide or construct. A nucleic acid or fragment thereof may be provided in linear (e.g., mRNA) or circular (e.g., plasmid) form as well as double-stranded or single-stranded forms. By “isolated” nucleic acid or polynucleotide is intended a nucleic acid molecule, DNA or RNA, which has been removed from its native environment. For example, a recombinant polynucleotide contained in a vector is considered isolated or “cloned” for the purposes of the present invention. Further examples of an isolated polynucleotide include recombinant polynucleotides maintained in heterologous host cells or purified (partially or substantially) polynucleotides in solution. Isolated RNA molecules include in vivo or in vitro RNA transcripts of the polynucleotides of the present invention. Isolated polynucleotides or nucleic acids according to the present invention further include such molecules produced synthetically.

[0047] The terms “fragment,” “variant,” and “derivative” when referring to HCV polypeptides of the present invention include any polypeptides which retain at least some of the immunogenicity or antigenicity of the corresponding native polypeptide. Fragments of HCV polypeptides of the present invention include proteolytic fragments, deletion fragments and in particular, fragments of HCV polypeptides which exhibit increased secretion from the cell or higher immunogenicity or reduced pathogenicity when delivered to an animal. Polypeptide fragments further include any portion of the polypeptide which comprises an antigenic or immunogenic epitope of the native polypeptide, including linear as well as three-dimensional epitopes. Variants of HCV polypeptides of the present invention include fragments, and also polypeptides with altered amino acid sequences due to amino acid substitutions, deletions, or insertions. Variants may occur naturally, such as an allelic variant. By an “allelic variant” is intended alternate forms of a gene occupying a given locus on a chromosome or genome of an organism or virus. Genes II, Lewin, B., ed., John Wiley & Sons, New York (1985), which is incorporated herein by reference. For example, as used herein, variations in a given gene product is a “variant”. Naturally or non-naturally occurring variations such as amino acid deletions, insertions or substitutions may occur. Non-naturally occurring variants may be produced using art-known mutagenesis techniques. Variant polypeptides may comprise conservative or non-conservative amino acid substitutions, deletions or additions. Derivatives of HCV polypeptides of the present invention, are polypeptides which have been altered so as to exhibit additional features not found on the native polypeptide. Examples include fusion proteins. An analog is another form of an HCV polypeptide of the present invention. An example is a proprotein which can be activated by cleavage of the proprotein to produce an active mature polypeptide.

[0048] In certain embodiments, the polynucleotide, nucleic acid, or nucleic acid fragment is DNA. In the case of DNA, a polynucleotide comprising a nucleic acid which encodes a polypeptide normally also comprises a promoter and/or other transcription or translation control elements operably associated with the polypeptide-encoding nucleic acid fragment. An operable association is when a nucleic acid fragment encoding a gene product, e.g., a polypeptide, is associated with one or more regulatory sequences in such a way as to place expression of the gene product under the influence or control of the regulatory sequence(s). Two DNA fragments (such as a polypeptide-encoding nucleic acid fragment and a promoter associated with the 5′ end of the nucleic acid fragment) are “operably associated” if induction of promoter function results in the transcription of mRNA encoding the desired gene product and if the nature of the linkage between the two DNA fragments does not (1) result in the introduction of a frame-shift mutation, (2) interfere with the ability of the expression regulatory sequences to direct the expression of the gene product, or (3) interfere with the ability of the DNA template to be transcribed. Thus, a promoter region would be operably associated with a nucleic acid fragment encoding a polypeptide if the promoter was capable of effecting transcription of that nucleic acid fragment. The promoter may be a cell-specific promoter that directs substantial transcription of the DNA only in predetermined cells. Other transcription control elements, besides a promoter, for example enhancers, operators, repressors, and transcription termination signals, can be operably associated with the polynucleotide to direct cell-specific transcription. Suitable promoters and other transcription control regions are disclosed herein.

[0049] A variety of transcription control regions are known to those skilled in the art. These include, without limitation, transcription control regions which function in vertebrate cells, such as, but not limited to, promoter and enhancer segments from cytomegaloviruses (the immediate early promoter, in conjunction with intron-A), simian virus 40 (the early promoter), and retroviruses (such as Rous sarcoma virus). Other transcription control regions include those derived from vertebrate genes such as actin, heat shock protein, bovine growth hormone and rabbit β-globin, as well as other sequences capable of controlling gene expression in eukaryotic cells. Additional suitable transcription control regions include tissue-specific promoters and enhancers as well as lymphokine-inducible promoters (e.g., promoters inducible by interferons or interleukins).

[0050] Similarly, a variety of translation control elements are known to those of ordinary skill in the art. These include, but are not limited to ribosome binding sites, translation initiation and termination codons, elements from picornaviruses (particularly an internal ribosome entry site, or IRES, also referred to as a CITE sequence).

[0051] A DNA polynucleotide of the present invention may be a circular or linearized plasmid or vector, or other linear DNA which may also be non-infectious and nonintegrating (i.e., does not integrate into the genome of vertebrate cells). A linearized plasmid is a plasmid that was previously circular but has been linearized, for example, by digestion with a restriction endonuclease. Linear DNA may be advantageous in certain situations as discussed, e.g., in Cherng, J. Y., et al., 1999, J. Control. Release 60:343-53, and Chen, Z. Y., et al., 2001, Mol Ther 3:403-10. As used herein, the terms plasmid and vector can be used interchangeably. In other embodiments, a polynucleotide of the present invention is RNA, for example, in the form of messenger RNA (mRNA). Methods for introducing RNA sequences into vertebrate cells are described in U.S. Pat. No. 5,580,859.

[0052] Polynucleotides, nucleic acids, and nucleic acid fragments of the present invention may be associated with additional nucleic acids which encode secretory or signal peptides, which direct the secretion of a polypeptide encoded by a nucleic acid fragment or polynucleotide of the present invention. According to the signal hypothesis, proteins secreted by mammalian cells have a signal peptide or secretory leader sequence which is cleaved from the mature protein once export of the growing protein chain across the rough endoplasmic reticulum has been initiated. Those of ordinary skill in the art are aware that polypeptides secreted by vertebrate cells generally have a signal peptide fused to the N-terminus of the polypeptide, which is cleaved from the complete or “full length” polypeptide to produce a secreted, or “mature” form of the polypeptide. In certain embodiments, the native leader sequence is used, or a functional derivative of that sequence that retains the ability to direct the secretion of the polypeptide that is operably associated with it. Alternatively, a heterologous mammalian leader sequence, or a functional derivative thereof, may be used. For example, the wild-type leader sequence may be substituted with the leader sequence of human tissue plasminogen activator (TPA) or mouse beta-glucuronidase.

[0053] In accordance with one aspect of the present invention, there is provided a polynucleotide construct, for example, a plasmid, comprising a nucleic acid fragment. As used herein, the term “plasmid” refers to a construct made up of genetic material (i.e., nucleic acids). Typically a plasmid contains an origin of replication which is functional in bacterial host cells, e.g., Escherichia coli, and selectable markers for detecting bacterial host cells comprising the plasmid. Plasmids of the present invention may include genetic elements as described herein arranged such that an inserted coding sequence can be transcribed and translated in eukaryotic cells. Also, the plasmid may include a sequence from a viral nucleic acid. However, such viral sequences normally are not sufficient to direct or allow the incorporation of the plasmid into a viral particle, and the plasmid is therefore a non-viral vector. In certain embodiments described herein, a plasmid is a closed circular DNA molecule.

[0054] The term “expression” refers to the biological production of a product encoded by a coding sequence. In most cases a DNA sequence, including the coding sequence, is transcribed to form a messenger-RNA (mRNA). The messenger-RNA is then translated to form a polypeptide product which has a relevant biological activity. Also, the process of expression may involve further processing steps to the RNA product of transcription, such as splicing to remove introns, and/or post-translational processing of a polypeptide product.

### Polypeptides and Immunogenic Epitopes

[0055] As used herein, the term “polypeptide” is intended to encompass a singular “polypeptide” as well as plural “polypeptides,” and comprises any chain or chains of two or more amino acids. Thus, as used herein, terms including, but not limited to “peptide,” “dipeptide,” “tripeptide,” “protein,” “amino acid chain,” or any other term used to refer to a chain or chains of two or more amino acids, are included in the definition of a “polypeptide,” and the term “polypeptide” can be used instead of, or interchangeably with any of these terms. The term further includes polypeptides which have undergone post-translational modifications, for example, glycosylation, acetylation, phosphorylation, amidation, derivatization by known protecting/blocking groups, proteolytic cleavage, or modification by non-naturally occurring amino acids.

[0056] Also included as polypeptides of the present invention are fragments, derivatives, analogs, or variants of the foregoing polypeptides, and any combination thereof. Polypeptides, and fragments, derivatives, analogs, or variants thereof of the present invention can be antigenic and immunogenic polypeptides related to HCV polypeptides, which are used to prevent or treat, i.e., cure, ameliorate, lessen the severity of, or prevent or reduce contagion of infectious disease caused by the HCV.

[0057] As used herein, an “antigenic polypeptide” or an “immunogenic polypeptide” is a polypeptide which, when introduced into a vertebrate, reacts with the vertebrate's immune system molecules, i.e., is antigenic, and/or induces an immune response in the vertebrate, i.e., is immunogenic. It is quite likely that an immunogenic polypeptide will also be antigenic, but an antigenic polypeptide, because of its size or conformation, may not necessarily be immunogenic. Isolated antigenic and immunogenic polypeptides of the present invention in addition to those encoded by polynucleotides of the invention, may be provided as a recombinant protein, a purified subunit, a viral vector expressing the protein, or may be provided in the form of an inactivated HCV vaccine, e.g., a live-attenuated virus vaccine, a heat-killed virus vaccine, etc.

[0058] By an “isolated” HCV polypeptide or a fragment, variant, or derivative thereof is intended an HCV polypeptide or protein that is not in its natural form. No particular level of purification is required. For example, an isolated HCV polypeptide can be removed from its native or natural environment. Recombinantly produced HCV polypeptides and proteins expressed in host cells are considered isolated for purposed of the invention, as are native or recombinant HCV polypeptides which have been separated, fractionated, or partially or substantially purified by any suitable technique, including the separation of HCV virions from culture cells in which they have been propagated. In addition, an isolated HCV polypeptide or protein can be provided as a live or inactivated viral vector expressing an isolated HCV polypeptide and can include those found in inactivated HCV vaccine compositions. Thus, isolated HCV polypeptides and proteins can be provided as, for example, recombinant HCV polypeptides, a purified subunit of HCV, a viral vector expressing an isolated HCV polypeptide, or in the form of an inactivated or attenuated HCV vaccine.

[0059] The term “epitopes,” as used herein, refers to portions of a polypeptide having antigenic or immunogenic activity in a vertebrate, for example a human. An “immunogenic epitope,” as used herein, is defined as a portion of a protein that elicits an immune response in an animal, as determined by any method known in the art. The term “antigenic epitope,” as used herein, is defined as a portion of a protein to which an antibody or T-cell receptor can immunospecifically bind as determined by any method well known in the art. Immunospecific binding excludes non-specific binding but does not exclude cross-reactivity with other antigens. Where all immunogenic epitopes are antigenic, antigenic epitopes need not be immunogenic.

[0060] As to the selection of peptides or polypeptides bearing an antigenic epitope (e.g., that contain a region of a protein molecule to which an antibody or T cell receptor can bind), it is well known in that art that relatively short synthetic peptides that mimic part of a protein sequence are routinely capable of eliciting an antiserum that reacts with the partially mimicked protein. See, e.g., Sutcliffe, J. G., et al., 1983, Science 219:660-666.

### Vaccine Compositions and Administration

[0061] The identified polynucleotides or polypeptides encoded by the polynucleotides of the invention may be in any form, and polypeptides are generated using techniques well known in the art. Examples include isolated HCV proteins produced recombinantly or proteins delivered in the form of an inactivated HCV vaccine, such as conventional vaccines.

[0062] When utilized, an isolated HCV polynucleotide or polypeptide or fragment, variant or derivative thereof is administered in an immunologically effective amount. The effective amount of conventional vaccines is determinable by one of ordinary skill in the art based upon several factors, including the antigen being expressed, the age and weight of the subject, and the precise condition requiring treatment and its severity, and route of administration.

[0063] In the instant invention, the combination of conventional antigen vaccine compositions with optimized nucleic acid or polypeptide compositions provides for therapeutically beneficial effects at dose sparing concentrations. For example, immunological responses sufficient for a therapeutically beneficial effect in patients predetermined for an approved commercial product, such as for the conventional product described above, can be attained by using less of the approved commercial product when supplemented or enhanced with the appropriate amount of nucleic acid or polypeptide.

[0064] A desirable level of an immunological response afforded by a DNA based pharmaceutical alone may be attained with less DNA by including an aliquot of a conventional vaccine. Further, using a combination of conventional and DNA based pharmaceuticals may allow both materials to be used in lesser amounts while still affording the desired level of immune response arising from administration of either component alone in higher amounts (e.g. one may use less of either immunological product when they are used in combination). This may be manifest not only by using lower amounts of materials being delivered at any time, but also to reducing the number of administrations points in a vaccination regime (e.g. 2 versus 3 or 4 injections), and/or to reducing the kinetics of the immunological response (e.g. desired response levels are attained in 3 weeks in stead of 6 after immunization).

[0065] Determining the precise amounts of DNA based pharmaceutical and conventional antigen is based on a number of factors as described above, and is readily determined by one of ordinary skill in the art.

[0066] The ability of an adjuvant to increase the immune response to an antigen is typically manifested by a significant increase in immune-mediated protection. For example, an increase in humoral immunity is typically manifested by a significant increase in the titer of antibodies raised to the antigen, and an increase in T-cell activity is typically manifested in increased cell proliferation, or cellular cytotoxicity, or cytokine secretion.

[0067] Nucleic acid molecules and/or polynucleotides of the present invention, e.g., plasmid DNA, mRNA, linear DNA or oligonucleotides, may be solubilized in any of various buffers. Suitable buffers include, for example, phosphate buffered saline (PBS), normal saline, Tris buffer, and sodium phosphate (e.g., 150 mM sodium phosphate). Insoluble polynucleotides may be solubilized in a weak acid or weak base, and then diluted to the desired volume with a buffer. The pH of the buffer may be adjusted as appropriate. In addition, a pharmaceutically acceptable additive can be used to provide an appropriate osmolarity. Such additives are within the purview of one skilled in the art. For aqueous compositions used in vivo, sterile pyrogen-free water can be used. Such formulations will contain an effective amount of a polynucleotide together with a suitable amount of an aqueous solution in order to prepare pharmaceutically acceptable compositions suitable for administration to a human.

[0068] Compositions of the present invention can be formulated according to known methods. Suitable preparation methods are described, for example, in Remington's Pharmaceutical Sciences, 16th Edition, A. Osol, ed., Mack Publishing Co., Easton, Pa. (1980), and Remington's Pharmaceutical Sciences, 19th Edition, A. R. Gennaro, ed., Mack Publishing Co., Easton, Pa. (1995). Although the composition may be administered as an aqueous solution, it can also be formulated as an emulsion, gel, solution, suspension, lyophilized form, or any other form known in the art. In addition, the composition may contain pharmaceutically acceptable additives including, for example, diluents, binders, stabilizers, and preservatives.

[0069] The invention illustratively described herein suitably can be practiced in the absence of any element or elements, limitation or limitations that are not specifically disclosed herein. Thus, for example, in each instance herein any of the terms “comprising”, “consisting essentially of”, and “consisting of” may be replaced with either of the other two terms, while retaining their ordinary meanings. The terms and expressions which have been employed are used as terms of description and not of limitation, and there is no intention that in the use of such terms and expressions of excluding any equivalents of the features shown and described or portions thereof, but it is recognized that various modifications are possible within the scope of the invention claimed. Thus, it should be understood that although the present invention has been specifically disclosed by embodiments, optional features, modification and variation of the concepts herein disclosed may be resorted to by those skilled in the art, and that such modifications and variations are considered to be within the scope of this invention as defined by the description and the appended claims.

[0070] This invention is more particularly described below and the Examples set forth herein are intended as illustrative only, as numerous modifications and variations therein will be apparent to those skilled in the art. As used in the description herein and throughout the claims that follow, the meaning of “a”, “an”, and “the” includes plural reference unless the context clearly dictates otherwise. The terms used in the specification generally have their ordinary meanings in the art, within the context of the invention, and in the specific context where each term is used. Some terms have been more specifically defined below to provide additional guidance to the practitioner regarding the description of the invention.

### EXAMPLES

[0071] The Examples which follow are illustrative of specific embodiments of the invention, and various uses thereof. They are set forth for explanatory purposes only, and are not to be taken as limiting the invention.

### Example 1

### Identification of Transmitted HCV Genomes

[0072] In addition, the invention is not intended to be limited to the disclosed embodiments of the invention. It should be understood that the foregoing disclosure emphasizes certain specific embodiments of the invention and that all modifications or alternatives equivalent thereto are within the spirit and scope of the invention as set forth in the appended claims.

[0073] In an effort to identify the structural genes of HCV viruses at the time of actual viral transmission and patient infection, a novel method for unambiguously identifying the transmitted 5′ half-genome and core and env genes of HCV viruses was developed. The identification of transmitted HCV genomes not only provides an important structural and genetic information at the time of viral transmission, it also permits a broader understating of HCV infection and provides a means for tracking evolution in the critical period between transmission, peak viremia and antibody seroconversion and thereafter (e.g., some infected patients develop persistent infection/disease whereas others experience a spontaneous or treatment-related complete clinical remission or cure).

[0074] Until the present method, the identification of actual transmitted HCV genomes has not been possible. The complete HCV genome of ˜9.6 kb in length (Moradpour, D., et al., 2007, Nature Rev Micro 5:453-463) is represented in FIG. 1 and the six globally-circulating genetic lineages (Simmonds, P., 2004, J Gen Virol 85:3173-3188) are represented in FIG. 2. The reasons that actual transmitted HCV genomes could not be identified were several-fold: First, there is a period lasting weeks and sometimes months between the moment of transmission and the first appearance of HCV in the blood (Bowen. D. G. and Walker, C. M., 2005, Nature 436: 946-952; Moradpour, D., et al., 2007, Nature Rev Micro 5:453-463). Second, HCV is genetically highly variable in its nucleotide sequence due to its error-prone RNA-dependent RNA polymerase; as a result, it exists in individuals as a complex mixture of sequences commonly referred to as a ‘quasispecies’ (Moradpour, D. et al., 2007, Nature Rev Micro 5:453-463). Third, conventional experimental approaches to sequencing the HCV genome from clinical samples introduced addition variation into the sequences as a consequence of Taq polymerase induced recombination and nucleotide misincorporation errors (Salazar-Gonzalez, J. F. et al., 2008, J Virol 82:3952-3970). Four, even if relatively accurate sequencing of HCV genomes were generated from clinical samples, there was no way to deduce from these myriad of sequences which one (or which ones) corresponded to actual transmitted viruses, or even viruses that were replication-competent and responsible for ongoing virus replication and persistence in the infected subject. Because transmitted viral molecular clones were not available, and because virus could not be isolated in vitro from clinical samples, biological analysis was challenging.

[0075] Some progress was made in 2003 when a molecular clone of an HCV genome was obtained from a patient with fulminant hepatitis C infection Kato, T. et al., 2003, Gastroenterology 125:1808-1817). This viral clone did not correspond to an actual transmitted virus genome, but it did replicate in human liver cell lines in vitro. Improvements in the replication of this clone have since been made by making genetic chimeras with other subgenomic HCV fragments (Moradpour, D., et al., 2007, Nature Rev Micro 5:453-463), but none of these clones of HCV correspond to transmitted viral genomes and none of them reproduce the genetic content or biological properties of actual transmitted viruses that are responsible for transmission and clinical infection in humans. Still another limitation of these clones is that the do not represent the six major genetic lineages and many more subtypes of HCV that circulate globally. For all these reasons, there is an urgent need for a method to identify the exact nucleotide sequence of transmitted HCV genomes. The present invention provides a method, which is based on SGA, direct amplicon sequencing without an interim cloning step, and a phylogenetic analysis of sequences with the context of a mathematical model of random virus evolution. The methods provided herein implemented a means for identifying transmitted HCV genomes. First, single genome amplification (SGA) of HIV-1 plasma viral RNA (Salazar-Gonzalez, J. F. et al., 2008, J Virol 82:3952-3970; Keele, B. F. et al., 2008, Proc Natl Acad Sci USA 105:7552-7557) followed by direct sequencing of uncloned amplicon DNA precludes Taq-induced nucleotide misincorporation and recombination in finished sequences. Second, because of the extremely short in vivo lifespan of plasma virus (t_{1/2}<1 day), (Neumann, A. U. et al., 1998, Science 282:103-107) analysis of plasma vRNA could provide a uniquely informative view of HCV replication dynamics and evolution, thereby allowing for a phylogenetic identification of the transmitted viral genome(s).

[0076] Thus, a method was devised utilizing SGA-based analysis of plasma vRNA obtained from acutely infected individuals in the earliest stages of infection, which was evaluated within the context of a model of random viral evolution. This method allowed the identification of nucleotide sequences of core genes, env genes and 5′ half-genomes of viruses responsible for establishing productive clinical infection weeks earlier (Table I).

### Example 2

### Mathematical Model

[0077] A new mathematical model for HCV was constructed based on (Keele, B. F. et al., 2008, Proc Natl Acad Sci USA 105:7552-7557; Lee, H. Y. et al., 2009, J Theor Biol 261:341-360) previously estimated parameters of HIV-1 generation time (2 days) (Markowitz, M. et al., 2003, J Virol 77:5037-5038) reproductive ratio (R₀, 6) (Stafford, M. A. et al., 2000, J Theor Biol, 203:285-301), reverse transcriptase (RT) error rate (2.16×10⁻⁵) (41), and an assumption that the initial virus replicates exponentially infecting R₀ new cells at each generation and diversifying under a model of evolution that assumes no selection. A comparable and novel model of HCV replication and diversification was developed based on derivatives of these parameters. Under both models, viruses would exhibit a Poisson distribution of mutations and a star-like phylogeny (Slatkin, M. et al., 1991, Genetics 129:555-562). These models allowed the assessment of the following two points: (i) the progeny of individual virus(es) that establish productive infection are identified in early stages of HCV infection as distinct genetic lineages with low sequence diversity; and (ii) the consensus sequence of each env lineage sampled prior to the onset of immune selection corresponds to the actual env sequence of transmitted or founder virus (or viruses) responsible for establishing productive clinical infection. Details of the models utilized for diversity analysis are provided in Example 5.

### Example 3

### HCV Patient Selection and Analysis

[0078] HCV patients were selected and samples collected as described. All subjects were regular donors of source plasma for whom serial specimens were available for analysis. As part of routine blood banking practice, these individuals were regularly questioned (and deferred) for homosexual encounters, sex for money, or intravenous drug use and they were monitored for acquisition of blood-born infectious agents (including HIV) that might indicate risk factors for HCV acquisition, but it is likely nonetheless that the cause of virus transmission was by one of these routes or by other types of sexual exposures. All subjects were plasma HCV RNA positive and HCV antibody negative.

[0079] Plasma samples were obtained from subjects with acute or very recent HCV infection representing subtypes 1a, 1b, 2 or 3. These consisted of weekly or twice-weekly serial collections from source plasma donors who became HCV infected during the course of their plasma donations. Plasma samples from 10 subjects with chronic HCV infection from the U.S. served as controls. All subjects gave informed consent, and plasma collections were performed with institutional review board and other regulatory approvals. Blood specimens were collected in acid citrate dextrose and plasma separated and stored at −20 to −70° C. Plasma samples were tested for HCV RNA and viral specific antigen and antibodies by a battery of commercial tests (Abbott; Chiron; Roche).

[0080] Differences in risk behaviors, routes of virus transmission, clinical stage and viral load in the infected partner, and co-morbid clinical conditions can all influence the frequency of HCV transmission (Kleinman, S. H. et al., 2009, Transfusion 49:2454-2489) and likely could affect the numbers of viruses transmitted and subsequent disease natural history, factors relevant to vaccine design and evaluation. In the present study, subjects had limited behavioral information available for analysis, so we could draw no firm conclusions regarding particular risk factors leading to infection.

[0081] Sequencing and analysis of 646 5′ half genome sequences from plasma vRNA from 10 subjects acutely infected with HCV genetic lineages 1, 2 and 3 was performed. To ensure proportional representation of plasma vRNA and avoid in vitro generated recombination events and Taq polymerase errors, SGA of plasma vRNA followed by direct sequence analysis of uncloned 5′ half-genome amplicons was performed (Palmer, S. et al., 2005, J Clin Microbiol 43:406-413; Salazar-Gonzalez, J. F. et al., 2008, J Virol 82:3952-3970; Shriner, D. et al., 2004, Genetics 167:1573-1583; Keele, B. F. et al., 2008, Proc Natl Acad Sci USA 105:7552-7557; Keele, B. F. et al., 2009, J Exp Med 206:1117-1134; Salazar-Gonzalez, J. F. et al., 2009, J Exp Med 206:1273-1289). Sequences were excluded if the chromatogram revealed “double peaks,” indicative of amplification from more than one template or early Taq polymerase error. The number of sequences analyzed per subject ranged from 25-68). The maximum within-patient 5′ half-genome sequence diversity ranged from 0.08% to 6.82%, with very low diversity found in 4 subjects (0.08-0.20%) and distinctly higher diversity found in 6 others (range 1.03-6.82%).

[0082] Viral RNA isolation and cDNA synthesis was performed as follows. For each sample, approximately 200 ul plasma was extracted using the QIAamp Viral RNA Mini Kit (Qiagen, Valencia, Calif.). RNA was eluted and immediately subjected to cDNA synthesis. Reverse transcription of RNA to single stranded cDNA was performed using SuperScript III reverse transcriptase using methods recommended by the manufacturer (Invitrogen Life Technologies, Carlsbad, Calif.). Briefly, each cDNA reaction included 1×RT buffer, 0.5 mM of each deoxynucleoside triphosphate, 5 mM dithiothreitol, 2 units/μl RNaseOUT (RNase inhibitor), 10 units/μl of SuperScript III reverse transcriptase, and 0.25 μM antisense primer. The antisense primers were designed specifically for different genotype. 1.NS4A-R1 5′-GCACTCTTCCATCTCATCGAACTC-3′(SEQ ID NO: 758) (nt 5451-5474 H77 (accession number NC_{—}004102)) for genotype 1, 2NS4A-R1 5′-TCCATCTCATCAAARGCCTCATA-3′ (SEQ ID NO:759) (nt 5445-5467 H77) for genotype 2 and 3aNS3-R2V2 5′-TTACTTCCAGATCAGCTGACA-3′(SEQ ID NO:760) for genotype 3. The mixture was incubated at 50° C. for 60 minutes followed by an increase in temperature to 55° C. for an additional 60 minutes. The reaction was then heat-inactivated at 70° C. for 15 minutes and then treated with RNaseH at 37° C. for 20 minutes. The newly synthesized cDNA was used immediately or kept frozen at −80° C.

[0083] Single genome amplification was performed from prepared viral cDNA. cDNA was serially diluted and distributed among wells of replicate 96-well plates so as to identify a dilution where PCR positive wells constituted less than 30% of the total number of reactions. At this dilution, most wells contain amplicons derived from a single cDNA molecule. This was confirmed in every positive well by direct sequencing of the amplicon and inspection of the sequence for mixed bases (double peaks), which would be evidence of priming from more than one original template or the introduction of PCR error in early cycles. Any sequence with evidence of mixed bases was excluded from further analysis. PCR amplification was carried out in the presence of 1× High Fidelity Platinum PCR buffer, 2 mM MgSO₄, 0.2 mM of each deoxynucleoside triphosphate, 0.2 μM of each primer, and 0.025 units/μl Platinum Taq High Fidelity polymerase in a 20 μl reaction (Invitrogen, Carlsbad, Calif.).

[0084] The nested or hemi-nested primers for generating 5′ half genome from different genotypes included: (1) genotype 1: 1^{st} round sense primer 1.core.F1 5′-ATGAGCACGAATCCTAAACCTCAAAGA-3′ (SEQ ID NO:761) (nt 342-368 H77) or 1.5utr.F1 5′-TGGGGGCGACACTCCACCAT-3′ (SEQ ID NO:762) (nt 14-33 H77) and 1^{st} round antisense primer 1.NS4A.R1 5′-GCACTCTTCCATCTCATCGAACTC-3′ (SEQ ID NO:763) (nt 5451-5474 H77), 2^{nd} round sense primer 1.core.F2 5′-TCAAAGAAAAACCAAACGTAACACCAACCG-3′ (SEQ ID NO:764) (nt 362-391 H77) or 1.5utr.F2 5′-CACCATAGATCACTCCCCTGTGAGGAACTA-3′ (SEQ ID NO:765) (nt 28-57 H77) and 2^{nd} round antisense primer 1.NS3A4A.R2 5′-AGGTGCTCGTGACGACCTCCAGG-3′ (SEQ ID NO:766) (nt 5297-5319 H77); (2) genotype 2: 1^{st} round sense primer 2.core.F1 5′-ATGAGCACAAATCCTAAACCTCAAAGA-3′ (SEQ ID NO:767) (nt 342-368 H77) and 1^{st} round antisense primer 2.NS4A.R1 5′-TCCATCTCATCAAARGCCTCATA-3′ (SEQ ID NO:768) (nt 5445-5467 H77), 2^{nd} round sense primer 2.core.F2 5′-AATCCTAAACCTCAAAGAAAAACCAAA-3′ (SEQ ID NO:769) (nt 351-377 H77) and 2^{nd} round antisense primer 2.NS3A4A.R2 5′-GACCTCAAGGTCAGCTTGCAT-3′(SEQ ID NO:770); (3) genotype 3: 1^{st} round sense primer 3a.core.F1 5′-ATGAGCACACTTCCTAAACCTCAAAGA-3′ (SEQ ID NO:771) and 1^{st} round antisense primer 3aNS3-R2V2 5′-TTACTTCCAGATCAGCTGACA-3′ (SEQ ID NO:772), 2^{nd} round sense primer 3a.core.F2 5′-TCAAAGAAAAACCAAAAGAAACACCATCCG-3′ (SEQ ID NO:773) and 2^{nd} round antisense primer PCR3a.NS3-R2V2 5′-TTACTTCCAGATCAGCTGACA-3′(SEQ ID NO:774). PCR was performed in MicroAmp 96-well reaction plates (Applied Biosystems, Foster City, Calif.) with the following PCR parameters: 1 cycle of 94° C. for 2 min; 35 cycles of a denaturing step of 94° C. for 15 s, an annealing step of 58° C. for 30 s, an extension step of 68° C. for 5 min, followed by a final extension of 68° C. for 10 min. The product of the 1^{st} round PCR was subsequently used as a template in the 2^{nd} round PCR under same conditions but with a total of 45 cycles. Amplicons were inspected on precasted 1% agarose E-gels 96 (Invitrogen Life Technologies, Carlsbad, Calif.). All PCR procedures were carried out under PCR clean room conditions using procedural safeguards against sample contamination, including pre-aliquoting of all reagents, use of dedicated equipment, and physical separation of sample processing from pre- and post-PCR amplification steps.

[0085] For DNA sequencing, 5′ half-genome amplicons were directly sequenced by cycle-sequencing using BigDye terminator chemistry and protocols recommended by the manufacturer (Applied Biosystems; Foster City, Calif.). Sequencing reaction products were analyzed with an ABI 3730×1 genetic analyzer (Applied Biosystems; Foster City, Calif.). Both DNA strands were sequenced using partially overlapping fragments. Individual sequence fragments for each amplicon were assembled and edited using the Sequencher program 4.7 (Gene Codes; Ann Arbor, Mich.). Inspection of individual chromatograms allowed for the identification of amplicons derived from single versus multiple templates. The absence of mixed bases at each nucleotide position throughout the entire 5′ half-genome sequences was taken as evidence of single genome amplification from a single viral RNA/cDNA template. This quality control measure enabled us to exclude from the analysis amplicons that resulted from PCR-generated in vitro recombination events or Taq polymerase errors and to obtain multiple individual 5′ half-genome, core and env sequences that proportionately represented those circulating in vivo in HCV virions (SEQ ID NOS: 23-757)).

[0086] All sequence alignments were initially made with GeneCutter (www.hiv.lanl.gov) to compensate for frame shifting mutations. Because the alignment was large and the env genes riddled with insertions and deletions, and because automatic multiple sequence alignment programs are often not effective in hypervariable regions, an iterative alignment process was developed to hand-check and improve the alignments. A consensus sequence for the sequence set from each individual was generated, which was then extracted from the full alignment and hand adjusted to improve the alignment. The within patient sets were then realigned to each patient consensus, each within patient alignment again hand adjusted, and a new consensus for each patient generated. This process was iterated several times to improve the alignments. To generate the final consensus sequence for each patient, ties near regions of insertion and deletions were resolved by considering the proximal codons and context. The full alignment is available in a supplemental data file, and the sequences are also available through GenBank. All 900 5′ half-genome sequences from acute and chronic patients and were deposited in GenBank and edited alignments can be accessed at www.hiv.lanl.gov/content/sequence/hiv/user_alignments/xxxx.

### Example 4

### Phylogenetic Analysis: Identification and Enumeration of Transmitted Viruses

[0087] Sequences from all 10 acutely-infected subjects were analyzed using neighbor-joining (NJ) phylogenetic tree methods together with a sequence visualization tool, Highlighter (www.HIV.lanl.gov), which allows tracing of common ancestry between sequences based on individual nucleotide polymorphisms. In all 10 subjects, we identified one or more distinct, low diversity monophyletic core, env and 5′ half-genome lineages. Examples are shown in FIGS. 3-8, which are to be compared with sequences from chronically-infected control subjects (FIGS. 9 and 10). Each lineage contained a unique set of identical or near identical sequences. Three of ten subjects with more homogeneous sequences had sequences that formed single lineages in NJ trees. One other subject had sequences that exhibited low overall diversity but were comprised of 4 distinct lineages distinguished by sets of 3 or 4 nucleotide polymorphisms. Model projections suggested that these subjects were infected by very closely related viruses, most likely from a source who himself or herself was recently infected, as opposed to a single virus that evolved into two distinct lineages in the brief period preceding peak viremia. Among the subjects with greater sequence diversity, all had sequences represented by two to twelve discernible lineages. There was no evidence of inter-lineage recombination. From the combined NJ and Highlighter analyses and modeling, we concluded that 3 of the 10 subjects (30%) had been productively infected by a single virus and 7 others (70%) had been infected by at least two to twelve infectious units.

[0088] The observed differences in maximum sequence diversity could be explained by differences in the numbers of viruses that infected these individuals, and this was examined by comparing model estimates for each subject (analyzed individually) for the minimum number of days that would be required to explain the observed within-patient sequence diversification from a single most recent common ancestor (MRCA) sequence. In this model, we do not adjust for mutations that are selected against and go unobserved because they result in unfit viruses; as a consequence, the timing estimates based on a comparison of the observed data to the model would tend to be biased towards a low estimate. Each of 6 subjects with more diverse viral sequences had minimum estimates for days since a MRCA virus that exceeded plausible values given their acute infection status. Conversely, all 4 subjects with more homogeneous sequences had sequence diversities and estimated days since a MRCA that fell well within or near model predictions, suggesting that these individuals had productive clinical infections originating from a single virus or from more than one very closely related virus.

[0089] To explore how sequences sampled during viral ramp-up in the pre-antibody seroconversion period conformed to model assumptions, sequences from the 4 subjects with low diversity were examined. For each subject, the frequency distribution of all intersequence Hamming distances (HD, defined as the number of base positions at which two genomes differ) and determined if it deviated from a Poisson model using a chi-squared goodness of fit test was obtained. Next it was determined whether or not the observed sequences evolved under a star-phylogeny model (i.e., all evolving sequences are equally likely and all coalesce at the founder) in the expected time frame based on clinical stage. Three of four samples were consistent with both the Poisson model and a star phylogeny. Among the samples that deviated in their mutational patterns from a Poisson distribution, it was found one samples had apparent branching structures based on sublineages with a small number of shared mutations. Based on the temporal appearance and patterns of these mutations, it is indicated that these sublineages are resulting from transmission of closely related variants of a donor quasispecies, or from stochastic mutations generated shortly after transmission, or from HLA-restricted CTL escape mutations that accumulated in patients sampled at later time-points. Sequences from subjects with heterogeneous sequences resulting from infection by more than one virus violated model expectations for Poisson distribution and star phylogeny of mutations but conformed when identifiable core, env and 5′ half-genome sub-lineages were analyzed individually.

[0090] Virus diversification was also examined directly by studying four subjects sampled longitudinally. This analysis included a total of 436 5′ half-genome sequences (ranged from 65-201 aa). One subjects had evidence of infection by one virus and three subjects by more than one virus. The model assumes that before the onset of immune selection, virus evolves randomly with the proportion of sequences identical to the transmitted virus(es) declining with time and sequential rounds of virus infection and replication. For subject 10029, (FIG. 7), whose plasma was sampled three times over a period of 21 days, the proportion of identical viral sequences of variant 1 declined from 46% to 43% to 15%, consistent with model projections. In all four subjects, (FIG. 5-8), it was found that the proportion of identical half-genome sequences declined in a manner that closely approximated the model. Importantly, in none of these 4 individuals was there evidence of a transmitted virus lineage that was lost during the acute infection period, nor evidence of a predominant viral lineage that appeared subsequently.

[0091] While the empirical results suggested that HCV sequences sampled during ramp-up viremia coalesce to virus(es) at or near transmission, alternative explanations were considered. Limitations imposed by virus sampling was considered. With a sample of at least 30 plasma vRNA sequences, this permitted 95% confident that a given missed variant comprised less than 10% of the virus population (Keele, B. F. et al., 2008, Proc Natl Acad Sci USA 105:7552-7557). Sampling biases were further minimized by sequential analyses in subjects and by additional SGAs using different primer sets, all of which gave identical results. Thus, sampling biases are unlikely to affect the conclusions regarding the minimum number or identity of the viral lineages that established productive clinical infection.

[0092] The possibility that sequences sampled during ramp-up viremia might not coalesce to a transmitted or founder virus but instead to a more recent common ancestor that evolved from this virus was also considered. Several lines of evidence demonstrated this was not the case. First, in all subjects, the estimated time to the MRCA (±95% C.I.) of sequences analyzed by Poisson and BEAST models overlapped the estimated durations of infection based on clinical history. Second, the frequency of HCV RNA polymerase-mediated nucleotide misincorporation affecting a half-genome length segment (˜5000 bp) in a single infection cycle is small (2×10⁻⁵×5000=0.10, or 1 half-genome mutation in every 10 virus infection events), and most mutations would be expected to be neutral or deleterious. Evidence for the latter was found by a statistically significant trend for lower than expected dN/dS ratios in half-genome of viruses from (p<0.01 by Wilcoxon signed rank test with continuity correction). Third, the relatively long HCV generation time (1-10 days), low R₀ (<10), and brief eclipse period (˜14-21 days) provided little time or opportunity for generation and outgrowth of a selected variant, a conclusion supported by model projections (SI). Finally, SGA was used to obtain >300 5′ half-genome sequences from 10 chronically infected, treatment naïve subjects. Maximum within-subject sequence diversity among the chronic subjects ranged from 1-4%, essentially overlapping the range of HDs found in the samples from the 6 of 7 acute patients infected by more than one divergent virus. None of the chronically infected subjects exhibited predominant low diversity lineages comparable to those found in acutely infected subjects. In conclusion, the 7 subjects in whom discrete low diversity viral sequence lineages were identified, these lineages most often coalesce to sequences of actual transmitted viruses. Consensus sequences of transmitted viruses identified by the method of the invention are provided in Table I.

[0093] The identification of viral core and env genes responsible for productive clinical infection will permit the examination of the phenotypic properties of core and Env proteins most relevant to natural virus infection. This is accomplished by expression analyses and recombinant DNA chimeric virus construction. Additionally, full-length transmitted HCV genomes are readily identified by SGA sequencing methods coupled with the mathematical phylogenetic analysis disclosed herein.

[0094] The current studies identified the genetic properties of HCV at and near the moment of transmission and in the critical period of virus replication and diversification leading to peak viremia and antibody seroconversion. Among 10 subjects, we found 3 (30%) to have evidence of infection by a single virus or virus-infected cell and 7 others (70%) by at least 2 to 12 viruses. Aside from early selection of CTL escape variants found in several subjects, there was no suggestion of virus adaptation to a more replicative variant or bottlenecking in virus diversity preceding peak viremia. These findings regarding the number of viruses leading to productive clinical infection are minimal estimates, and additional viruses could conceivably have been transmitted but not sufficiently propagated in vivo to allow detection within the scope or timing of our sampling. We note, however, the observation of a low number of transmitted viruses (range 1-12; median 3) is consistent with epidemiological observations of the relative inefficiency of virus transmission by most routes (Tohme, R. A. et al., 2010, Heptalogy, (pre-print Epub:DOI:10.1002/hep.23808); Liu, C. H. et al., 2006, Clin Infect Dis, 42:1254-1259; Kleinman, S. H. et al., 2009, Transfusion, 49:2454-2489). The observed findings of low multiplicity infection and limited viral evolution preceding peak viremia suggest a crucial but finite window of potential vulnerability of HCV to potential treatments including vaccine-elicited immune responses.

### Example 5

### Methods of Phylogenetic Analysis and Cloning of HCV Genomes

[0095] 5′ half-genome, core and env diversity analysis was performed as follows. We classified two very distinctive levels of within-patient sequence diversity that we observed in the 10 study subjects as either “homogeneous” or “heterogeneous.” This was done using three different strategies that all concurred. Firstly, samples were visually inspected using neighbor-joining phylogenies and the Highlighter tool (www.hiv.lanl.gov) and it was found that 6 samples clearly had much greater diversity than 4 others. Next, all pairwise Hamming Distances were examined (HD, defined as the number of base positions at which the two genomes differ, excluding gaps) within each sample. The same 6 heterogeneous samples exhibited distinct peaks with a multimodal distribution inconsistent with expansion from single infecting virus. Lastly, to formalize the criteria and test whether the 6 heterogeneous samples reflected transmission of multiple variants, a mathematical model described herein was used to predict the expected maximum HD that could be observed under a homogeneous infection assumption (i.e., infection by a single virus), given the clinical stage of the sample. If the maximum HD in the sample was much greater than the expected, the observed diversity was considered to have originated at a time prior to transmission, i.e. in the donor indicating that multiple strains transmitted from the donor to the recipient established the infection; this was again the case for all 6 heterogeneous samples. For the homogeneous samples, we considered the possibility that these individuals had been infected by a single virus (or infected cell) or by two or more very closely related viruses. Either scenario could result in a low overall sequence diversity, but in the case of transmission of two or more very closely related viruses, the distribution of HDs would not fit model expectations. This was observed to be the case in 1 of the 4 subjects with homogeneous infections.

[0096] Star phylogeny analysis was performed as described. With no selection pressure, one can expect homogeneous viral populations to evolve from a founder strain following a star-like phylogeny, (i.e., all evolving sequences coalesce at the founder). The veracity of this proposition can be investigated by inspecting the sequence alignment. Because mutations are rare, one does not expect shared mutations in a star phylogeny. When this is indeed the case, the distribution of intersequence HD's is constrained to be a self-convolution (defined below) of the distribution of the HD's from the sequences to the ancestral sequence. In particular, for every pair of sequences s₁ and s₂, let HD[s₁,s₂] be the number of base positions at which the two differ and the probability distribution it follows be P_{I}(HD). Next, each sequence in the sample is compared with the consensus sequence, which is assumed to be the founder strain, followed by computation of the corresponding HD distribution. Denoting s₀ the founder strain, for every sequence s₁ computed HD[s₀,s₁] and denoted P_{c}(HD) the distribution it follows. Under a star-phylogeny evolution, P_{I}(HD) is given by the self-convolution of P_{C}(HD):

$${P}_{I} ( HD = n ) = {\sum }_{k = 0}^{n} {P}_{C} ( HD = k ) {P}_{C} ( HD = n - k )$$

[0097] Occasional deviations from a star phylogeny are, however, expected. The sampling of 30 sequences, for example, from a later generation of an exponentially growing population with six-fold growth per generation has about 5% chance of including a pair of sequences, which shares five initial generations, a 25% chance of those sharing the first four, and overwhelmingly likely to include sequences that share three ancestors. However, because the rate of mutations in the region under study is about 1 per 20 generations (see next section), this leads to only about 10% chance of finding sequences sharing a pair of mutations, and less than 1% chance of sharing more than that. The probabilities are slightly enhanced by the early stochastic events that can lead to the virus producing less than six descendants in some generations, but it remains overwhelmingly likely that the sequences share few mutations. Thus when a sample had two or more sublineages of sequences that were defined by more than two shared mutations, the observation is best explained by transmission of multiple closely related viruses (3 such cases were identified). In later clinical stages, CTL driven immune selection might contribute to such a pattern and selection cannot be distinguished from transmission of multiple viruses.

[0098] In the mathematical models described in Example 1, it is assumed a homogeneous infection occurs in which the virus grows exponentially with no selection pressure, no recombination, no occurrence of back mutations and a constant mutation rate across positions and across lineages. Under this scenario, the HD frequency distribution is given by a Poisson distribution whose mean depends linearly on the number of generations since the founder strain. Previously estimated parameters of HIV-1 generation time (2 days) (Markowitz, M. et al., 2003, J Virol, 77:5037-5038), reproductive ratio (R₀, 6) (Stafford, M. A. et al., 2000, J Theor Biol, 203:285-301), reverse transcriptase point mutation rate (ε=2.16×10⁻⁵) (Mansky, L. M. et al., 1995, J Virol, 69:5087-5094) were utilized as starting point. It was further assumed that the initial virus replicated exponentially by infecting exactly R0 new cells at each generation, which, for simplicity, happened in two equal bursts at τ and 2τ. The reverse transcriptase error rate estimate (Mansky, L. M. et al., 1995, J Virol, 69:5087-5094) is based on sequencing virus produced in vitro after a single round of replication. If a mutation occurs that is lethal with regard to viral production it would not be detected in this assay, and such mutations may be similarly reduced in the natural, in vivo situation. On the other hand, lethal mutations that were not infectious would be retained in the single round of replication assay, but may be selected against in vivo, hence the mutation rate we are using in the model will have a bias towards being greater than the substitution rate we observe in vivo, potentially resulting in slight underestimates of the time to the MRCA.

[0099] The intersequence HD's are not independent, but because of the star phylogeny they are the pairwise sums of a set of independent Poisson distributed variates. The form of their distribution, including the (singular) covariance matrix, is therefore known up to one unknown parameter, the lambda of the underlying Poisson distribution. This parameter was estimated by fitting the observed data to the expected form using a Maximum Likelihood method, and assessed the goodness of fit using a chi-square goodness-of fit test statistic calculated from a singular value decomposition of the covariance matrix. When the data were consistent with a Poisson distribution, we used the λ of the best fitting distribution to estimate a divergence time from the most recent common ancestor (MRCA) based on the estimated number of generations required to achieve the observed distribution. One can in fact show the following relationship for λ:

$$λ ( t ) = ɛ {N}_{B} ( \frac{5}{8} t \frac{1 + ϕ}{ϕ} + \frac{1 - ϕ}{{ϕ}^{2}} )$$

[0100] Therefore, once we obtain a best fitting Poisson distribution, we calculate its mean λ* and use the above time-dependency relationship to estimate time since MRCA (in days) as follows:

$$t = \frac{8 ϕ}{5 ( 1 + ϕ )} ( \frac{{λ}^{*}}{ɛ {N}_{B}} - \frac{1 - ϕ}{{ϕ}^{2}} )$$

[0101] where N_{B} is the sequence length in base pairs and

$$ϕ = \sqrt{1 + \frac{8}{{R}_{0}}} .$$

[0102] Furthermore, the fraction of identical sequences expected at that time is:

$$Exp ⌊ - ɛ {N}_{B} ( \frac{5}{8} t \frac{1 + ϕ}{ϕ} + \frac{1 - ϕ}{{ϕ}^{2}} ) + O ( {ɛ}^{2} {N}_{B} ) ⌋$$

[0103] The change in the Poisson distribution over time illustrates the increasing diversity expected under the model (SI FIG. 13). It is apparent that as time increases, the number of identical sequences decreases and the frequency distribution of the intersequence HD's at various times post-infection shifts to higher HD values.

[0104] Bayesian analysis was performed as follows. The time, in days, to the most recent common ancestor (MRCA) for each patient was also estimated using a Bayesian Markov Chain Monte Carlo (MCMC) approach, implemented in BEAST v1.4.1 (Drummond, A. J. et al., 2006, PLoS Biol 4:e88; Drummond, A. J. et al., 2007, BMC Evol Biol 7:214). The mean substitution rate was fixed at 2.16×10⁻⁵ substitutions per site per generation and all analysis were carried out using the General Time Reversible (GTR) substitution model with invariant sites and gamma-distributed rate heterogeneity (4 gamma categories). The substitution and rate heterogeneity models were unlinked across codon positions and we assumed exponential population growth and a relaxed (uncorrelated exponential) molecular clock. This model was used for analysis of each patient's viral sequence alignment and the MCMC algorithm was run for at least 10⁷ (Drummond, A. J. et al., 2006, PLoS Biol, 4:e88) generations (logging every 1000 generations; and burn-in set to 10% of the original chain length), with additional runs carried out if the Effective Sample Size (ESS) for the estimate was below 100. The results were visualized in TRACER (Drummond, A. J. et al., 2005, Mol Biol Evol 22:1185-1192). We repeated this analysis with the five free parameters of the GTR model fixed at values estimated using the combined data from all acute patients inferred to be infected with a single viral strain using the HyPhy package (Kosakovsky Pond, S. L. et al., 2006, Mol Biol Evol 23:1891-1901) and with alternative demographic and evolutionary models (relaxed uncorrelated molecular clock with logistic population growth and strict molecular clock with exponential population growth). Estimates and confidence intervals for the MRCA times were similar for the alternative relaxed clock models, but approximately 25% lower using a strict molecular clock (not shown).

[0105] To better understand our likelihood of missing infrequent transmitted variants, a power study was performed to explore the probability of sampling limitations. It was shown that with a sample of at least n=20 plasma vRNA sequences, we could be 95% confident that a given missed variant comprised less than 15% of the virus population (Keele, B. F. et al., 2008, Proc Natl Acad Sci USA 105:7552-7557). For samples for which r≧30, we could be 95% confident not to have missed any variant that comprised at least 10% of the total viral population.

[0106] Core and env gene and full-length viral genome cloning can be performed as described herein. SGA-derived amplicons containing full-length core or env genes can be molecularly cloned for protein expression and biological analysis. Transmitted core and env were identified as described along with SGA-derived genes from chronically infected control subjects. In order to reduce the probability of generating molecular core and env clones with Taq polymerase errors, samples were re-amplified from the first round PCR product under the same nested PCR conditions but used 10 fewer cycles. Correctly-sized amplicons identified by gel electrophoresis were gel purified using the QIAquick gel purification kit according to manufacturer's recommendations (Qiagen, Valencia, Calif.), ligated into the pcDNA3.1 Directional Topo vector (Invitrogen Life Technologies, Carlsbad, Calif.), and transformed into TOP10 competent bacteria. Bacteria were plated on LB agar plates supplemented with 100 μg/ml of ampicillin and cultured overnight at 30° C. Single colonies were selected and grown overnight in liquid LB broth at 30° C. with 225 rpm shaking followed by plasmid isolation. Each molecular clone was sequenced confirmed to be identical to the transmitted core and env sequence(s) for each patient. Full-length genomes were chemically synthesized, as described (Salazar-Gonzalez, J. F. et al., 2009, J Exp Med 206:1273-1289) and cloned into pcDNA3.1 vectors, as described above.

[0107] The examples given above are merely illustrative and are not meant to be an exhaustive list of all possible embodiments, applications or modifications of the invention. Thus, various modifications and variations of the described methods and systems of the invention will be apparent to those skilled in the art without departing from the scope and spirit of the invention. Although the invention has been described in connection with specific embodiments, it should be understood that the invention as claimed should not be unduly limited to such specific embodiments. Indeed, various modifications of the described modes for carrying out the invention which are obvious to those skilled in molecular biology, immunology, chemistry, biochemistry or in the relevant fields are intended to be within the scope of the appended claims.

APPENDIX A
Table I: 5′Transmitted HCV Sequence: Inferred 5/ Half Transmitted/Founder Virus Sequence

Donor 68470/ Panel Number 10021/ Transmitted Variant #1 (SEQ ID NO: 1)
TCGCCCACAGGACGTCAAGTTCCCGGGTGGCGGTCAGATCGTTGGTGGAGTTTACTTGTTGCCGCGCAGGGGCCCTAGATTGGGTGTGCGCGC
GACGAGGAAGACTTCCGAGCGGTCGCAACCTCGAGGTAGACGTCAGCCTATCCCCAAGGCGCGTCGGCCCGAGGGCAGGTCCTGGGCTCAGCC
CGGGTACCCTTGGCCCCTCTATGGCAATGAGGGTTGCGGGTGGGCGGGATGGCTCCTGTCTCCCCGTGGCTCTCGGCCTAGCTGGGGCCCCAC
AGACCCCCGGCGTAGGTCGCGCAATTTGGGTAAGGTCATCGATACCCTTACGTGCGGCTTCGCCGACCTCATGGGGTACATACCGCTCGTCGG
CGCCCCTCTCGGAGGCGCTGCCAGGGCCCTGGCGCATGGCGTCAGGGTTCTGGAAGACGGCGTGAACTATGCAACAGGGAATCTTCCTGGTTG
CTCTTTCTCTATCTTCCTTCTGGCTCTGCTCTCTTGCCTGACCGTGCCCGCTTCAGCCTACCAAGTGCGCAACTCTTCGGGGCTTTACCATGT
CACCAATGATTGCCCTAACTCGAGTATTGTGTACGAGGCGGCCGATGCCATTCTGCACACTCCGGGGTGTGTCCCTTGTGTTTACGAGGGTAA
CACCTCGAGGTGTTGGGTGGCGGTGACCCCCACAGTGGCCACCAGGGACGGCAAACTCCCCACGACGCAGCTTCGACGCCACATCGACCTGCT
TGTCGGGAGTGCCACCCTCTGCTCGGCCCTCTACGTGGGGGATCTGTGCGGGTCTGTCTTTCTTGTCGGCCAACTGTTCACCTTCTCTCCCAG
GCGCCACCGGACGATGCAGAACTGCAATTGTTCTATCTACCCCGGCCATATAACGGGCCACCGCATGGCATGGGATATGATGATGAACTGGTC
CCCTACGGTGGCATTGGCGGTAGCTCAGCTGCTCCGGATCCCACAAGCCATCATGGACATGATCGCTGGTGCTCACTGGGGAGTCCTGGCGGG
CATAGCGTATTTCTCCATGGTGGGGAACTGGGCGAAGGTCCTGGTAGTGCTGCTGCTATTTGCCGGCGTCGACGCGGAGACCCACGTCACCGG
GGGAGCTGCCGGCCGCTCCACGGCTGGGATTGCTGGTCTCTTCAGCCCAGGCGCCAGACAGAACATCCAACTGATCAATACCAACGGCAGTTG
GCACATCAATAGCACGGCCCTGAACTGCAACGACAGCCTCAACACCGGCTGGATAGCAGGGCTCTTCTATTCCAACAAATTCAACTCTTCGGG
CTGTCCCGAGAGGTTGGCCAGCTGCCGACGCCTTGCCGATTTTGCCCAGGGCTGGGGCCCCATCAGTTACGCCAACGGAAGCGGCCCCGACGA
ACGCCCCTACTGCTGGCACTACCCCCCAAGACCTTGTGGTATTGTGCCCGCTAAGAGCGTGTGTGGCCCGGTGTATTGCTTCACTCCCAGCCC
CGTGGTGGTGGGAACGACCGACAGGTCGGGCGCGCCTACCTACAACTGGGGTGAAAATGACACGGACGTCTTCGTCCTCAACAACACCAGGCC
GCCGCTGGGCAATTGGTTCGGTTGTACCTGGATGAACTCAAGTGGATTCACCAAAGTGTGCGGAGCGCCCCCTTGTGTCATCGGAGGGGTGGG
CAACAACACCTTGCGCTGCCCCACTGATTGCTTCCGCAAACATCCGGAAGCCACATACTCTCGGTGCGGCTCCGGTCCTTGGATCACACCCAG
GTGCATGGTCGACTACCCATATAGGCTTTGGCATTATCCTTGTACCATCAACTACACCTTATTCAAAGTCAGGATGTACGTGGGAGGGGTCGA
GCACAGGCTGGAAGCTGCCTGCAACTGGACGCGGGGCGAACGCTGTGATCTGGAAGACAGGGACAGGTCCGAGCTCAGTCCGTTACTGCTGTC
CACCACGCAGTGGCAGGTCCTTCCGTGTTCTTTTACGACCCTGCCAGCCTTGTCCACCGGCCTCATCCACCTCCACCAGAACATTGTGGACGT
GCAGTACTTGTACGGGGTAGGGTCAAGCATCGCGTCCTGGGCCATTAAGTGGGAGTACGTCGTTCTCCTGTTCCTTCTGCTTGCAGACGCGCG
CGTCTGCTCCTGCTTGTGGATGATGTTACTCATATCCCAAGCGGAGGCGGCTTTGGAGAACCTCGTAGTACTCAATGCAGCATCCCTGGCCGG
GACGCACGGTCTTGTGTCCTTCCTCGTGTTCTTCTGCTTTGCGTGGTATCTGAAGGGTAGGTGGGCGCCCGGAGCGGTCTACGCCCTCTACGG
GATGTGGCCTCTCCTCCTGCTCCTGCTGGCGCTGCCTCAGCGGGCATACGCACTGGACACGGAGGTGGCCGCGTCGTGTGGCGGCGTTGTTCT
TGTCGGGTTGATGGCGCTGACTCTGTCACCACATTACAAGCGCCTCATCTGCTGGTGCGTGTGGTGGCTTCAGTATTTTCTAACCAGAGTGGA
AGCGCACCTGCACGTGTGGGTTCCCCCCCTCAACGTCCGGGGGGGGCGCGATGCCATCATCTTACTCATGTGTGTTATACACCCGGCTCTGAT
ATTTGACATCACCAAACTGCTGCTGGCCGTCTTCGGACCCCTTTGGATTCTTCAAGCCAGTTTGCTGAAAGTCCCCTACTTCGTGCGCGTTCA
AGGCCTTCTCCGAATCTGCGCGCTAGCGCGGAAGTTAGCCGGAGGTCATTACGTGCAGATGGCCATCATCAAGTTAGGGGCGCTTACTGGCAC
CTATGTCTATAACCATCTCACTCCTCTCCGAGACTGGGCGCACAACGGCCTGCAAGACCTGGCCGTGGCTGTAGAACCAGTCATCTTCTCCCG
AATGGAGACCAAACTCATCACGTGGGGGGCAGACACCGCCGCGTGCGGCGACATCATCAACGGCTTGCCCGTCTCCGCCCGCAGGGGCCGGGA
GATATTGCTTGGACCAGCCGACGGAATGGCCTCTAAAGGGTGGAGGTTGCTGGCGCCCATCACAGCGTACGCCCAGCAGACGAGAGGCCTCCT
AGGGTGCATAATCACCAGCCTGACTGGCCGGGATAAAAACCAAGTGGAGGGTGAGGTCCAGATCGTGTCAACTGCTACCCAAACCTTCCTGGC
AACGTGCATCAATGGGGTATGCTGGACTGTCTACCACGGGGCCGGAACGAGGACCATCGCATCACCCAGGGGTCCTGTTATCCAGATGTACAC
CAATGTGGACCAGGACCTTGTGGGCTGGCCTGCTCCTCAAGGTTCCCGCTCATTGACACCCTGCACCTGCGGCTCCTCGGACCTTTACCTGGT
CACGAGGCACGCCGATGTCATTCCCGTGCGCCGGCGAGGTGATAGCAGGGGCAGCTTGCTCTCGCCCCGGCCCATTTCCTACTTGAAAGGCTC
CTCGGGGGGTCCGCTGTTGTGCCCCGCGGGACACGCCGTGGGCATATTTAGGGCCGCGGTGTGCACCCGTGGTGTGGCTAAGGCGGTGGACTT
CATCCCTGTGGAGAACCTAGAGACAACCATGAGATCCCCGGTGTTCACGGACAACTCTTCTCCACCAGCAGTGCCCCAGAGCTTCCAGGTGGC
TCACCTGCATGCTCCCACTGGCAGCGGCAAGAGCACCAAGGTCCCGGCTGCGTACGCAGCTCAGGGCTACAAAGTGCTAGTGCTCAACCCCTC
TGTTGCTGCAACATTGGGCTTTGGTGCTTACATGTCCAAGGCTCATGGGGTCGATCCTAATGTCAGGACGGGGGTGCGAACAATTACCACCGG
CAGCCCCATCACGTACTCCACCTACGGCAAGTTCCTTGCCGACGGCGGGTGCTCAGGAGGTGCTTATGACATAATAATTTGTGATGAGTGCCA
CTCCACGGATGCCACATCCATCTTGGGCATCGGCACTGTCCTTGACCAAGCAGAGACCGCGGGGGCGAGACTGGTTGTGCTCGCCACTGCTAC
CCCTCCGGGCTCCGTCACCGTGCCCCATCCTAACATCGAGGAGGTTGCTCTGTCCACCACCGGAGAGATCCCTTTTTACGGCAAGGCTATTCC
CCTCGAGGTCATCAAGGGGGGAAGGCATCTCATCTTCTGCCACTCAAAGAAAAAGTGTGACGAGCTCGCCGCAAAGCTGGTCGCATTGGGCAT
CAATGCCGTGGCCTACTACCGCGGTCTTGACGTGTCTGTCATCCCGACCAGCGGCGATGTTGTCGTCGTGGCGACCGATGCTCTCATGACTGG
CTATACCGGCGACTTCGACTCTGTGATAGACTGCAACACGTGTGTCACCCAGACAGTCGATTTCAGCCTTGACCCTACCTTCACCATTGAGAC
AACCACGCTCCCCCAAGACGCTGTCTCCCGGACTCAACGTCGGGGCAGAACCGGCAGGGGGAAGCCAGGCATCTACAGATTTGTGGCACCGGG
GGAACGCCCCTCCGGCATGTTCGACTCGTCCGTCATCTGTGAGTGCTATGACGCGGGCTGTGCTTGGTATGAGCTCACGCCCGCCGAGACTAC
AGTTAGGCTACGAGCGTACATGAACACCCCGGGGCTCCCCGTGTGCCAGGACCATCTTGAATTTTGGGAGGGCGTCTTTACGGGCCTCACCCA
TATAGATGCCCACTTTCTATCCCAGACAAAGCAGAGTGGAGAGAACTTCCCTTACCTGGTAGCGTACCAAGCCACCGTGTGCGCTAGGGCTCA
AGCCCCTCCCCCATCGTGGGACCAGATGTGGAAGTGTTTGATCCGCCTCAAACCCACCCTCCATGGGCCAACACCCCTGCTATACAGACTGGG
CGCTGTTCAGAATGAAGTCACCCTGACGCACCCAGTCACCAAATACATCATGACATGCATGTCGGCTGA
Donor 66801/ Panel Number 10025/ Transmitted Variant #1 (SEQ ID NO: 2)
TCGCCCACAGGACGTCAAGTTCCCGGGTGGCGGTCAGATCGTTGGTGGAGTTTACTTGTTACCGCGCAGGGGCCCTAGATTGGGTGTGCGCGC
GACGAGGAAGACTTCCGAGCGGTCGCAACCTCGAGGTAGACGTCAGCCTATCCCCAAGGCGCGTCGGCCCGAGGGCAGGACCTGGGCTCAGCC
CGGGTACCCTTGGCCCCTCTATGGCAATGAGGGCTGCGGGTGGGCGGGATGGCTCCTGTCCCCCCGTGGCTCTCGGCCTAGCTGGGGCCCTAC
AGACCCCCGGCGTAGGTCGCGCAATTTGGGTAAGGTCATCGATACCCTCACGTGCGGCTTCGCCGACCTCATGGGGTACATTCCGCTCGTCGG
CGCGCCTCTTGGAGGCGCCGCCAGGGCCCTGGCGCATGGTGTCCGGGTTCTGGAGGACGGCGTGAACTATGCAACAGGGAACCTTCCTGGTTG
CTCTTTCTCTATCTTCCTTTTGGCCCTGCTCTCTTGCCTGACTGTACCCGCGTCGGCCTATCAAGTTCGCAACTCCTCGGGGCTTTATCATGT
CACCAATGATTGCCCTAACTCGAGTATTGTGTACGAGACGGCCGACGCCATTCTACACTCTCCGGGGTGTGTCCCTTGCGTCCGCGAGGGTAA
CGCCTCGAAGTGCTGGGTGCCGGTGGCCCCCACAGTGGCCACCAAGGACGGCAAACTCCCCACGACGCAGCTTCGACGTCACATCGATCTGCT
TGTCGGGAGCGCCACCCTCTGCTCGGCCCTCTATGTGGGGGACTTGTGCGGGTCTGTCTTCCTTGTCGGTCAACTGTTCACTTTCTCCCCCAG
ACGCCACTGGACAACGCAAGACTGCAACTGTTCCATCTACCCCGGCCATATAACGGGCCACCGCATGGCATGGGATATGATGATGAATTGGTC
TCCTACAGCAGCGCTGGTAATGGCTCAACTGCTCAGAGTCCCGCAAGCTGTCATGGACATGATCGCTGGAGCCCACTGGGGAGTCCTAGCGGG
CATAGCGTATTTCTCCATGGTGGGGAACTGGGCAAAGGTCTTGTTGGTGCTGTTGTTGTTTGCCGGCGTCGACGCGAGCACTCGCACCATCGG
GGGGTCTGCTGCTGCGACCACGTCCGGATTCGCCAAGCTCTTCGCTGCTGGCTCCCGCCAGAATGTCCAGCTGATCAACACCAACGGAAGTTG
GCACATCAATCGCACGGCCTTGAACTGTAATGCGAGTCTCGACACTGGCTGGGTAGCGGGGCTCTTCTATTACCACAAATTCAACTCTTCGGG
CTGCCCCGAGAGGATGGCCAGCTGTAGACCCCTTGCCGATTTCGACCAGGGCTGGGGCCCTATCAGCTACGCCAACGCAAGCGGCACCGACCA
CCCCCCCTACTGCTGGCACTACCCCCCAAAGCCTTGCGGTATCGTGCCGGCACAGAACGTATGTGGCCCAGTATATTGCTTCACTCCCAGCCC
TGTGGTGGTGGGAACGACCGACAAGTTGGGCGTGCCCACCTACAACTGGGGTAGCAATGACACGGACGTCTTCGTCCTTAACAACACCAGGCC
ACCGTTGGGCAATTGGTTCGGTTGCACCTGGATGGACTCATATGGATATACCAAAGTGTGCGGAGCGCCCCCTTGTGTCATCGGAGGGGTAGG
CAATAACACCTTGCACTGCCCCACTGACTGTTTCCGCAAGCATCCAGAAGCCACATACTCTCGGTGTGGCTCCGGTCCCTGGATCACGCCCAG
GTGCCTGGTCCACTACTCTTACAGGCTTTGGCATTATCCTTGTACTGTCAACTACACCCTGTTCAAAGTCAGGATGTACGTGGGAGGGGTCGA
GCACAGGCTGGAGGTCGCTTGCAACTGGACGCGGGGCGAACGTTGCGATCTGGACGACAGGGACAGGTCCGAGCTCAGCCCGCTGCTGCTGTC
CACCACACAGTGGCAGGTTCTTCCGTGTTCTTTCACGACCTTGCCAGCCTTGACTACCGGCCTCATCCACCTCCACCAGAACATCGTGGATGT
GCAATATTTGTACGGGGTGGGGTCAAGCATTGTGTCCTGGGCCATCAAGTGGGAGTACGTCATCCTCTTGTTTCTCCTGCTTGCAGACGCGCG
CATTTGTTCCTGCTTGTGGATGATGCTACTCATATCCCAGGTGGAGGCAGCTTTGGAGAACCTCGTGCTGCTCAACGCGGCGTCTCTGACCGG
GGCGCACGGTCTTGTGTCCTTCCTCGTGTTTTTCTGCTTTGCATGGTATCTGAAGGGTAGGTGGGTGCCCGGAGCGGCCTACGCCCTCTACGG
GATGTGGCCTCTCCTCCTGCTTCTGTTGGCGTTGCCCCAACGGGCATACGCACTAGACACGGAAGTGGCCGCGTCGTGTGGTGGCGTTGTTAT
TGTCGGGTTAATGGTGCTGACTCTGTCACCGCACTACAAGCGCTATATCAGCTGGTGCTTATGGTGGCTCCAATATTTCCTGACTAGAGTGGA
AGCGCAACTGCACGTATGGGTCCCCCCCCTCAACGTCCGAGGAGGCCGCGACGCTGTCATCTTGCTCATGTGTGTTATACACCCGGCCTTGGT
ATTTGACATCACCAAGCTGCTGCTGGCCGTCTTCGGACCCCTTTGGATTCTTCAAACCAGTCTGCTCAAAGTGCCCTACTTCGTGCGCGTTCA
GGGCCTTCTCCGGCTCTGCGCGCTAGCGCGCAAGATGGCCGGAGGCCATTACGTGCAAATGGCCATCATCAAGGTGGGGGCGCTTACTGGCAC
CTACATCTATAACCATCTTACTCCTCTTCGGGATTGGGCGCACAACAGCCTACGAGATCTGGCCGTGGCTGTAGAGCCAGTCGTCTTTTCCCA
GATGGAGACTAAGCTCATCACCTGGGGGGCGGACACCGCCGCCTGCGGTGACATCATCAACGGCTTGCCCGTCTCTGCCCGTAGGGGCCGAGA
GATACTGCTCGGACCGGCCGACGGAGCGGTCTCCAAGGGGTGGAGGTTGCTAGCGCCCATCACGGCGTATGCCCAGCAGACAAGGGGCCTTTT
GGGATGTATAATTACCAGCCTGACCGGCCGGGACAAAAACCAGGTGGAGGGTGAGGTTCAGATTGTGTCTACTGCTGCCCAGACTTTCCTGGC
AACCTGCATCAACGGGGTGTGCTGGACTGTCTACCACGGGGCCGGGACAAGGACCATCGCGTCGCCCAAGGGTCCCGTTATCCAGATGTATAC
CAATGTAGACCAAGACCTCGTAGGCTGGCCCGCTCCCTATGGTGCTCGCTCATTGACACCCTGCACTTGCGGCTCCTCGGACCTTTACCTGGT
CACGAGGCACGCCGATGTCATTCCCGTACGCCGGCGGGGTGATAGCAGGGGCAGCCTGCTTTCGCCTCGACCCATCTCTTACTTGAAAGGCTC
CTCGGGGGGCCCACTACTGTGCCCCGCGGGACACGCCGTAGGCATATTCAGGGCCGCGGTGTGCACCCGTGGAGTGGCTAAGGCGGTGGACTT
TATCCCCGTAGAGAGCCTAGAGACAACCATGAGGTCCCCGGTGTTCACAGACAACTCCTCCCCACCAGCGGTGCCCCAGAGCTTCCAGGTGGC
CCACCTGCACGCTCCCACCGGCAGCGGTAAGAGCACCAAGGTCCCGGCCGCATACGCGGCTCAGGGCTACAAGGTGCTGGTGCTCAACCCCTC
CGTTGCTGCAACACTGGGCTTTGGCGCCTACATGTCCAAGGCCCATGGGATTGATCCGAACATCAGGACTGGGGTGAGGACAATTACTACTGG
CAGCCCCATCACGTACTCCACCTACGGCAAGTTCCTCGCTGACGGCGGGTGCTCAGGGGGTGCTTATGACATAATAATTTGTGACGAGTGCCA
CTCCACGGATGCAACATCCATCTTGGGCATCGGCACTGTCCTTGACCAAGCAGAGACAGCGGGGGCGAGGCTGGTTGTGCTCGCCACCGCTAC
CCCTCCGGGCTCCGTCACTGTGCCCCACTCTAACATCGAGGAGGTTGCTCTGTCCACTACCGGAGAGATCCCCTTTTACGGCAAGGCTATCCC
CCTTGAGGCAATCAAGGGGGGGAGACATCTCATTTTCTGCCACTCAAGGAAAAAGTGCGACGAGCTCGCCGCAAGGCTGGTCGCGTTGGGCAT
CAATGCTGTGGCCTACTACCGCGGCCTTGACGTGTCCGTCATCCCGACCAGCGGCGACGTTGTCGTCGTGGCAACTGATGCCCTCATGACCGG
CTTTTCCGGCGACTTCGACTCGGTGATAGACTGCAACACGTGTGTCACCCAGACAGTCGACTTCAGCCTTGACCCTACCTTCACCATTGAGAC
AACCACGCTTCCTCAGGACGCTGTTTCCCGCACCCAACGTCGGGGCAGGACTGGCAGGGGGAAGCCAGGCATCTATAGATTTGTGGCACCGGG
AGAGCGCCCCTCCGGCATGTTCGACTCGTCCGTCCTCTGTGAGTGCTATGACGCAGGCTGTGCTTGGTATGAGCTCACACCCGCCGAGACCAC
AGTTAGGTTACGAGCGTACATGAACACCCCGGGGCTTCCCGTGTGCCAGGACCATCTTGAATTTTGGGAGGGCGTCTTCACAGGTCTCACCCA
TATAGACGCCCACTTCTTATCTCAGACAAAGCAGAGTGGGGAAAACTTTCCTTACCTGGTAGCGTACCAAGCCACCGTGTGCGCTAGAGCTCA
AGCTCCCCCCCCATCGTGGGACCAGATGTGGAAGTGCTTGATCCGCCTCAAGCCCACCCTTCATGGGCCAACACCTCTGCTATACAGACTGGG
CGCTGTTCAGAATGAAATCACCCTGACGCACCCGATCACCAAGTACATCATGACATGCATGTCGGCTGACCT
Donor 66719/ Panel Number 10024/ Transmitted Variant #1 (SEQ ID NO: 3)
TCGCCCACAGGACGTCAAGTTCCCGGGTGGCGGTCAGATCGTTGGTGGAGTTTACTTGTTGCCGCGCAGGGGCCCTAGATTGGGTGTGCGCGC
GACGAGGAAGACTTCCGAGCGGTCGCAACCTCGAGGTAGACGTCAGCCTATCCCCAAGGCACGTCGGCCCGAGGGCAGGACCTGGGCTCAGCC
CGGGTACCCTTGGCCCCTCTACGGCAATGAGGGCTGCGGATGGGCGGGATGGCTCCTGTCTCCCCGTGGCTCTCGGCCTAGTTGGGGCCCCAC
AGACCCCCGGCGTAGGTCGCGCAATTTGGGTAAGGTCATCGATACCCTTACGTGCGGCTTCGCCGACCTCATGGGGTACATACCGCTCGTCGG
CGCCCCCCTTGGAGGCGCTGCCAGGGCCCTGGCGCACGGCGTCCGGGTTCTGGAAGACGGCGTGAACTATGCAACAGGGAATCTTCCTGGTTG
CTCTTTCTCTATCTTCCTCCTGGCCCTGCTCTCTTGCTTGACCGTGCCCGCTTCGGCCTACCAAGTGCGCAACTCCACGGGGCTTTATCATGT
CACCAACGACTGCCCTAATTCGAGTATTGTGTACGAGGCGGCCGATGCTATCCTGCACACTCCGGGGTGTGTCCCTTGCGTTCGCGAGGGTAA
CGTCTCGAGGTGCTGGGTGGCGATGACCCCCACGGTGGCCACTAGGGACGGCAAGCTCCCCACAACGCAGCTTCGACGCCACATCGATCTGCT
TGTCGGGAGCGCCACCCTTTGCTCGGCCCTCTACGTGGGGGACCTGTGCGGGTCTGTCTTTCTTGTCGGTCAGATGTTTACTTTCTCTCCCAG
GCGCCACTGGACGACGCAAGACTGCAATTGTTCCATGTACCCCGGCCATATAACGGGTCACCGCATGGCATGGGATATGATGATGAACTGGTC
CCCTACGACGGCGTTGATAGTAGCTCAGCTGCTCCGGATCCCACAAGCCATCTTGGACATGATCGCTGGTGCTCACTGGGGAGTCCTGGCGGG
CATTGCGTACTTTTCCATGGTGGGGAACTGGGCGAAGGTCCTGGTAGTGCTGCTGTTATTTGCCGGCGTCGACGCGGGAACCCACGTCAGCGG
GGGAGCCGTCGCCCGTGGCGCAGCTTCAATTGCCGGGTTGTTTAACTCAGGTGCCAAACAGAACATCCAGCTGATCAACACCAACGGCAGTTG
GCACATCAATAGCACGGCCTTGAACTGCAATGATAGCCTTAACACCGGCTGGATAGCAGGGCTTTTCTACTACAACAAATTCAACTCTTCAGG
CTGTCCCGACAGGTTGGCCAGCTGCCGGCGCCTTACCGATTTTGCCCAGGGCTGGGGCCCTATCAGTCACGCCAACGGAAGTGGCCCCGACGA
ACGCCCTTACTGCTGGCACTACCCCCCAAGACCTTGTGGTATTGTGCCGGCAAAGAGCGTGTGTGGCCCAGTATATTGCTTCACCCCCAGCCC
TGTGGTGGTGGGGACGACCGACAAGTCGGGCGCGCCTACCTACAACTGGGGTGATAATGATACGGACGTTTTCGTCCTTAACAACACTAGGCC
ACCGCTGGGCAATTGGTTCGGTTGTACCTGGATGAACTCAACTGGATTCACCAAAGTGTGCGGAGCGCCCCCCTGTGTCATCGGAGGGGTGGG
CAATAACACCTTGCGCTGCCCCACTGATTGTTTCCGCAAGCATCCGGAAGCCACGTACTCTCGGTGCGGCTCTGGTCCCTGGATTACACCCAG
GTGCCTGGTCGACTATCCGTATAGGCTGTGGCATTATCCTTGTACCATCAACTACACCATCTTCAAAGTCAGGATGTACGTGGGAGGGGTCGA
GCACAGGCTGGAAGCTGCCTGCAACTGGACGCGGGGCGAACGTTGTGATCTGGACGACAGGGACAGGTCCGAGCTCAGCCCGTTGCTGCTGTC
CACCACGCAGTGGCAGATCCTTCCGTGTTCCTTCACGACCCTGCCAGCCTTGTCCACCGGCCTCATCCACCTCCACCAGAACATTGTGGACGT
GCAGTACTTGTACGGGGTGGGGTCAAGCATCGCGTCCTGGGCCATTAAATGGGACTACGTCGTCCTCCTCTTCCTTTTGCTTGCAGACGCGCG
CGTCTGCTCCTGCTTGTGGATGATGTTACTCATATCCCAAGCGGAGGCGGCTTTGGAGAACCTCGTAGTACTCAATGCAGCATCCCTGGCCGG
GACACACGGTCTTGCATCCTTCCTCGTGTTCTTCTGCTTTGCGTGGTATCTGAAGGGTAGGTGGGTGCCCGGAGCAGTCTACGCCCTCTACGG
GATGTGGCCTCTCCTCCTGCTCCTGTTGGCGTTGCCCCAGCGGGCATACGCACTGGACACGGAGGTGGCCGCGTCGTGTGGCGGCGTTGTCCT
TGTCGGGGTAATGGCGCTGACTCTGTCACCATATTACAAGCACTATATCGGCTGGTGCTTGTGGTGGCTTCAGTATTTTCTGACTAGAGCAGA
AGCGCAACTGCATGTGTGGGTTCCCCCCCTCAACGTTCGAGGGGGGCGCGATGCCGTCATCTTACTCATGTGTGTTGTACACCCGACCTTGGT
ATTTGACATCACCAAGCTACTGCTGGCCGTCTTCGGACCCCTTTGGGTTCTGCAAGCCAGCCTGCTTAAGGTGCCCTACTTCGTGCGCGTTCA
AGGCCTTCTCCGGCTCTGCGCGCTAGCGCGGAAGGTGGTCGGAGGCCATTACGTGCAAATGGTCATCATCAAGTTGGGGGCGCTTACTGGCAC
TTATGTCTATAACCATCTCACTCCTCTTCGGGACTGGGCGCACAACGGCCTCCAAGATCTGGCCGTGGCTGTAGAGCCAGTCGTCTTCTCCCG
AATGGAAACCAAGCTCATCACGTGGGGGGCAGACACTGCCGCGTGCGGTGATATCATCAACGGCTTGCCCGTCTCCGCCCGCAGGGGGCAGGA
GATACTGCTCGGACCAGCCGATGGAATGGTCTCCAAGGGGTGGAGGTTGCTGGCGCCCATCACGGCGTACGCCCAGCAGACGAGGGGCCTCCT
AGGGTGCATAATCACCAGCCTGACTGGCCGAGACAAAAACCAAGTGGAGGGTGAAGTCCAGATTGTGTCAACTGCTGCCCAAACTTTTCTGGC
AACGTGCATCAATGGGGTATGCTGGACTGTCTACCATGGGGCTGGAACGAGGACCATTGCATCACCCAAGGGTCCTGTTATCCAGATGTATAC
CAATGTGGACAAAGACCTTGTGGGCTGGCCCGCCCCTCAAGGTTCCCGCTCATTGACACCCTGCACCTGCGGCTCCTCGGACCTCTACTTGGT
CACGAGGCATGCCGATGTCATTCCCGTGCGCCGGCGAGGTGATAGCAGGGGCAGCCTGCTTTCGCCCCGGCCCATTTCCTACTTGAAAGGCTC
CTCGGGGGGTCCGCTGTTGTGCCCCGCGGGGCACGCCGTGGGCATATTCAGGGCCGCGGTGTGCACCCGTGGAGTGGCTAAGGCGGTGGACTT
CATCCCTGTGGAGAACCTAGAGACAACCATGAGGTCCCCGGTGTTTACGGACAACTCCTCTCCACCAGCAGTGCCCCAGAGCTTCCAGGTGGC
CCACCTGCACGCTCCCACCGGCAGCGGCAAGAGCACCAAGGTCCCGGCTGCATACGCGGCTCAGGGCTATAAAGTGCTAGTGCTCAACCCCTC
CGTTGCTGCAACACTGGGCTTTGGTGCTTACATGTCCAAGGCCCATGGGGTCGAGCCTAATATCAGGACCGGGGTGAGAACAATTACCACTGG
CAGCCCCATTACGTACTCCACCTATGGCAAGTTCCTTGCCGACGGCGGGTGTTCAGGGGGCGCCTATGACATAATAATTTGTGATGAGTGCCA
CTCCACGGATGCCACATCCATCTTGGGCATCGGCACTGTCCTCGACCAAGCAGAGACTGCGGGGGCGAGACTGGTTGTGCTCGCCACCGCTAC
TCCTCCGGGCTCTGTCACTGTGCCCCATCCTAACATCGAGGAGGTTGCTCTGTCCACCACCGGAGAGGTCCCTTTTTACGGCAAGGCCATCCC
CCTTGAGGTAATCAAAGGGGGGAGACATCTCATCTTCTGTCACTCAAAGAAGAAGTGCGATGAGCTCGCCGCAAAGCTGGTCGCGTTGGGCGT
CAATGCCGTGGCCTACTACCGCGGTCTTGACGTTTCTGTCATCCCAACCAGCGGCGATGTTGTCGTCGTGGCGACCGACGCTCTCATGACCGG
CTTTACCGGCGACTTCGACTCGGTGATAGACTGCAACACGTGTGTCACTCAGACAGTCGATTTCAGCCTTGACCCTACCTTCACCATTGAGAC
AACCACGCTCCCCCAGGATGCTGTCTCCCGTACTCAACGTCGGGGCAGGACTGGCAGGGGGAAGCCAGGCATCTACAGATTTGTGGCACCGGG
AGAGCGCCCCTCTGGCATGTTCGACTCGTCTGTCCTCTGCGAGTGCTATGACGCGGGCTGTGCTTGGTATGAGCTGACGCCCGCCGAGACTAC
AGTTAGGCTACGAGCGTACATGAACACCCCGGGGCTTCCCGTGTGCCAGGACCATCTTGAGTTTTGGGAGGGCGTCTTTACGGGCCTCACCCA
TATAGATGCCCATTTTCTGTCCCAGACAAAGCAGAGTGGGGAGAACCTTCCTTACCTGGTAGCGTACCAAGCCACCGTGTGCGCTAGGGCTCA
AGCCCCTCCCCCATCGTGGGACCAGATGTGGAAGTGTTTGATCCGCCTCAAACCCACCCTCCACGGGCCAACACCCCTGCTATACAGACTGGG
TGCTGTTCAGAATGAAGTCACCCTGACGCACCCAATCACCAAATACATCATGA
Donor 66719/ Panel Number 10024/ Transmitted Variant #2 (SEQ ID NO: 4)
CCGCCCACAGGACGTCAAGTTCCCGGGTGGCGGTCAGATCGTTGGTGGAGTTTACTTGTTGCCGCGCAGGGGCCCTAGATTGGGTGTGCGCGC
GACGAGGAAGACTTCCGAGCGGTCGCAACCTCGTGGTAGACGTCAGCCTATCCCCAAGGCACGTCGGCCCGAGGGCAGGACCTGGGCTCAGCC
CGGGTACCCTTGGCCCCTCTATGGCAATGAGGGCTGCGGGTGGGCGGGATGGCTCCTGTCTCCCCGTGGCTCTCGGCCTAGTTGGGGCCCCAC
AGACCCCCGGCGTAGGTCGCGCAATTTGGGTAAGGTCATCGATACCCTTACGTGCGGCTTCGCCGACCTCATGGGGTACATACCGCTCGTCGG
CGCCCCTCTTGGAGGCGCTGCCAGGGCCCTGGCGCACGGCGTCCGGGTTCTGGAAGACGGCGTGAACTATGCAACAGGGAACCTTCCTGGTTG
CTCTTTCTCTATCTTCCTCCTAGCCCTGCTCTCTTGCTTGACCGTGCCCGCTTCGGCCTACCAAGTGCGCAACTCCACGGGGCTTTATCATGT
CACCAACGACTGCCCTAATTCGAGTATTGTGTACGAGGCGGCCGATGCTATCCTGCACACTCCGGGGTGTGTCCCTTGCGTTCGCGAGGGTAA
CGTCTCGAGGTGCTGGGTGGCGATGACCCCCACGGTGGCCACTAGGGACGGCAAGCTCCCCACAACGCAGCTTCGACGCCACATCGATCTGCT
TGTCGGGAGCGCCACCCTTTGCTCGGCCCTCTACGTGGGGGACCTGTGCGGGTCTGTCTTTCTTGTCGGTCAGATGTTTACTTTCTCTCCCAG
GCGCCACTGGACAACGCAAGACTGCAATTGTTCCATGTACCCCGGCCATATAACGGGTCACCGCATGGCATGGGATATGATGATGAACTGGTC
CCCTACGACGGCATTGATAGTGGCTCAGCTGCTCCGGATCCCACAAGCCATCTTGGACATGATCGCTGGTGCTCACTGGGGAGTCCTGGCGGG
CATTGCGTATTTCTCCATGGTGGGGAACTGGGCGAAGGTCCTGGTAGTGCTGCTGTTATTTGCCGGCGTCGACGCGGGAACCCACGTCAGCGG
GGGATCCATCGCCCGTGGCGCAGCTTCAATTGCCGGGTTGTTTAACCAAGGTGCCAGACAGAACATCCAGCTGATCAACACCAACGGCAGTTG
GCACATCAATAGCACGGCCTTGAATTGCAATGATAGCCTTAACACCGGCTGGATAGCAGGGCTTTTCTATTACAACAAATTCAACTCTTCAGG
CTGTCCCGAGAGGTTGGCCAGCTGCCGGCGCCTTACCGATTTTGCCCAGGGCTGGGGCCCTATCAGTTATGCCAACGGAAGTGGCCCCGACGA
ACGCCCTTACTGCTGGCACTACCCTCCAAGACCTTGTGGTATTGTGCCGGCAAAGAGCGTGTGTGGCCCAGTATATTGCTTCACCCCCAGCCC
TGTGGTGGTGGGGACGACCGACAAGTCGGGCGCGCCTACCTACAACTGGGGTGATAATGATACGGACGTTTTCGTCCTTAACAACACTAGGCC
ACCGCTGGGCAATTGGTTCGGTTGTACCTGGATGAACTCAACTGGATTCACCAAAGTGTGCGGAGCGCCCCCCTGTGTCATCGGAGGGGTGGG
CAATAACACCTTGCGCTGCCCCACTGATTGTTTCCGCAAGCATCCGGAAGCCACGTACTCTCGGTGCGGCTCTGGTCCCTGGATTACACCCAG
GTGCCTGGTCGACTATCCGTATAGGCTGTGGCATTATCCTTGTACCATCAACTACACCATCTTCAAAGTCAGGATGTACGTGGGAGGGGTCGA
GCACAGGCTGGAAGCTGCCTGCAATTGGACGCGGGGCGAACGTTGTGATCTGGACGACAGGGACAGGTCCGAGCTCAGCCCGTTGCTGCTGTC
CACCACGCAGTGGCAGGTCCTTCCGTGTTCCTTCACGACCCTGCCAGCCTTGTCCACCGGCCTCATCCACCTCCACCAGAACATTGTGGACGT
GCAGTACTTGTACGGGGTGGGGTCAAGCATCGCGTCCTGGGCCATTAAGTGGGACTACGTCGTCCTCCTGTTCCTTTTGCTTGCAGACGCGCG
CGTCTGCTCCTGCTTGTGGATGATGTTACTCATATCCCAAGCGGAGGCGGCTTTGGAGAACCTCGTAGTACTCAATGCAGCATCCCTGGCCGG
GACACACGGTCTTGCATCCTTCCTCGTGTTCTTCTGCTTTGCATGGTATCTGAAGGGTAGGTGGGTGCCCGGAGCAGTCTACGCCCTCTACGG
GATGTGGCCTCTCCTCCTGCTCCTGTTGGCGTTGCCCCAGCGGGCATACGCACTGGACACGGAGGTGGCCGCGTCGTGTGGCGGCGTTGTCCT
TGTCGGGGTAATGGCGCTGACTCTGTCACCATATTATAAGCACTATATCAGCTGGTGCTTGTGGTGGCTTCAGTATTTTCTGACTAGAGCAGA
AGCGCAACTGCATGTGTGGGTTCCCCCCCTCAACGTTCGAGGGGGGCGCGACGCCGTCATCTTACTCATGTGTGCTGTACACCCGACCTTGGT
ATTTGACATCACCAAGCTACTGCTGGCCGTCCTCGGACCCCTTTGGGTTCTGCAAGCCAGTCTGCTTAAGGTGCCCTACTTCGTGCGCGTTCA
AGGCCTTCTCCGGCTCTGCGCGTTAGCGCGGAAGGTGGTCGGAGGCCATTACGTGCAAATGGTCATCATCAAGTTGGGGGCGCTTACTGGCAC
TTATGTCTATAACCATCTCACTCCTCTTCGGGACTGGGCGCACAACGGCCTTCAAGATCTGGCCGTGGCTGTAGAGCCAGTCGTCTTCTCCCG
AATGGAAACCAAGCTCATCACGTGGGGGGCAGACACTGCCGCGTGCGGTGATATCATCAACGGCTTGCCCGTCTCCGCCCGCAGGGGGCAGGA
GATACTGCTCGGACCAGCCGACGGAATGGTCTCCAAGGGGTGGAGGTTGCTGGCGCCCATCACGGCGTACGCCCAGCAGACGAGGGGCCTCCT
AGGGTGCATAATCACCAGCCTGACTGGCCGAGACAAAAACCAAGTGGAGGGTGAAGTCCAGATTGTGTCAACTGCTGCCCAAACTTTCCTGGC
AACGTGCATCAATGGGGTATGCTGGACTGTCTACCATGGGGCTGGAACGAGGACCATTGCATCACCCAAGGGTCCTGTTATCCAGATGTATAC
CAATGTGGACAAGGACCTCGTGGGCTGGCCCGCCCCTCAGGGTTCCCGCTCATTGACACCCTGCACCTGCGGCTCCTCGGACCTTTACTTGGT
CACGAGGCATGCCGATGTCATTCCCGTGCGCCGGCGAGGTGATAGCAGGGGCAGCCTGCTTTCGCCCCGGCCCATTTCCTACTTGAAAGGCTC
CTCGGGGGGTCCGCTGTTGTGCCCCGCGGGACACGCCGTAGGCATATTCAGGGCCGCGGTGTGCACCCGTGGAGTGGCTAAGGCGGTGGACTT
TATCCCTGTAGAGAACCTAGAGACAACCATGAGGTCCCCGGTGTTTACGGACAACTCCTCTCCACCAGCAGTGCCCCAGAGCTTCCAGGTGGC
CCACCTGCACGCTCCCACCGGCAGCGGCAAGAGCACCAAGGTCCCGGCTGCATACGCGGCTCAGGGCTATAAAGTGCTAGTGCTCAACCCCTC
CGTTGCTGCAACACTGGGCTTTGGTGCTTACATGTCCAAGGCCCATGGGGTCGAGCCTAATATCAGGACCGGGGTGAGAACAATTACCACTGG
CAGCCCCATTACGTACTCCACCTACGGCAAGTTCCTTGCCGACGGCGGGTGTTCAGGGGGTGCTTATGACATAATAATTTGTGATGAGTGCCA
CTCCACGGATGCCACATCCATCTTGGGCATCGGCACTGTCCTCGACCAAGCAGAGACTGCGGGGGCGAGACTGGTTGTGCTCGCCACCGCTAC
TCCTCCGGGCTCTGTCACTGTGCCCCATCCTAACATCGAGGAGGTTGCTCTGTCCACCACCGGAGAGGTCCCTTTTTACGGCAAGGCCATCCC
CCTTGAAGTAATCAAAGGGGGGAGACACCTCATCTTCTGTCACTCAAAGAAGAAGTGCGACGAGCTCGCCGCAAAGCTGGTTGCGTTGGGCGT
CAATGCCGTGGCCTACTACCGCGGTCTTGACGTTTCTGTCATCCCGACCAGCGGCGATGTTGTCGTCGTGGCAACCGACGCTCTCATGACCGG
CTTTACCGGCGACTTCGACTCGGTGATAGACTGTAACACGTGTGTCACCCAGACAGTCGATTTCAGCCTTGACCCTACCTTCACCATTGAGAC
AACCACGCTCCCCCAGGATGCTGTCTCCCGTACTCAACGTCGGGGCAGGACTGGCAGGGGGAAGCCAGGCATCTACAGATTTGTGGCACCGGG
AGAGCGCCCCTCCGGCATGTTCGACTCGTCCGTCCTCTGTGAGTGCTATGACGCGGGCTGTGCTTGGTATGAGCTGACGCCCGCCGAGACTAC
AGTTAGGCTACGAGCGTACATGAACACCCCGGGGCTTCCCGTGTGCCAGGACCATCTTGAGTTTTGGGAGGGCGTCTTTACGGGCCTCACCCA
TATAGATGCCCATTTTCTGTCCCAGACAAAGCAGAGTGGGGAGAACCTTCCTTACCTGGTAGCGTACCAAGCCACCGTGTGCGCTAGGGCTCA
AGCCCCTCCCCCATCGTGGGACCAGATGTGGAAGTGTTTAATCCGCCTCAAACCCACCCTCCACGGGCCAACACCCCTGCTATACAGACTGGG
TGCTGTTCAGAATGAAATCACCCTGACACACCCAATCACCAAATACATCATGA
Donor 66747/ Panel Number 10012/ Transmitted Variant #1 (SEQ ID NO: 5)
TCGCCCACAGGACGTTAAGTTCCCGGGTGGCGGTCAGATCGTTGGTGGAGTTTACTTGTTGCCGCGCAGGGGCCCTAGAATGGGTGTGCGCGC
GCCGAGGAAGACTTCCGAGCGGTCGCAACCTCGAGGTAGACGTCAGCCTATCCCCAAGGCACGTCGGCCCGAGGGCAGGACCTGGGCTCAGCC
CGGGTACCCTTGGCCCCTCTATGGCAATGAGGGCTGCGGGTGGGCGGGATGGCTCCTGTCCCCCCGCGGCTCTCGGCCTAGTTGGGGCCCCAC
AGACCCCCGGCGTAGGTCGCGCAATTTGGGTAAGGTCATCGACACCCTTACGTGCGGCTTCGCCGACCTCATGGGGTACATACCGCTCGTCGG
CGCCCCTCTTGGAGGCGCTGCCAGGGCCCTGGCGCATGGCGTTCGGGTTCTGGAAGACGGCGTGAACTATGCAACAGGGAACCTTCCTGGTTG
CTCTTTCTCTATCTTCTTTCTGGCCCTGCTCTCTTGTCTGACTGTGCCCGCTTCGGCCTACCAAGTGCGCAACTCTACAGGGCTCTACCACGT
CACCAATGATTGCCCTAACTCGAGTATTGTGTACGAGGCGCCTGATGCCATCCTGCACACTCCGGGGTGTGTCCCTTGCGTTCGCGAGGGTAA
CGCCTCGAGGTGTTGGGTGGCGATGACCCCCACGGTGGCCACCAGGGACGGCAAACTCCCCGCGACGCAGCTTCGACGTCACATCGATCTGCT
TGTCGGGAGCGCCACCCTCTGTTCGGCTCTTTACGTGGGGGACCTGTGCGGGTCTGTCTTTCTTGTGGGTCAACTGTTTACCTTCTCCCCCAG
GCGCCACTGGACGACGCAAGACTGCAATTGCTCTATCTATCCCGGCCATATAACGGGTCACCGCATGGCATGGGATATGATGATGAACTGGTC
CCCGACGACGGCGTTGGTAATGGCTCAGCTGCTCCGGATCCCGCAAGCCATCTTGGACATGATCGCTGGTGCCCACTGGGGAGTCTTGGCGGG
CATAGCGTATTTCTCCATGGTGGGGAACTGGGCGAAGGTCCTGGTAGTGCTGCTGCTATTCGCCGGCGTCGACGCGGAAACCATGACCACCGG
GGGGGCCGCCGCTCGCAACGTGTATAGAATTTCCAGCTTCTTCTCGCCGGGCCCCCAGCAGAACATCCAGCTGATCAACACCAACGGCAGTTG
GCACATCAATAGGACGGCCTTGAACTGCAACGACAGCCTTAACACCGGCTGGTTAGCAGGGCTTTTCTATCATCGCAGCTTCAACTCTTCAGG
CTGTCCTGCGAGGCTGGCCAGCTGCCGACGCCTTACCGACTTTGCCCAGGGCTGGGGCCCTATCAGCCATGCCAACGGCAGCGGCCCCGACCA
ACGCCCCTACTGTTGGCACTACCCCCCAAAACCTTGCGGTATTGTGCCCGCACGGAACGTGTGTGGCCCGGTATATTGCTTCACCCCCAGTCC
CGTGGCGGTGGGAACGACCGACAGGGCGGGCGTCCCTACCTACCGCTGGGGTGAAAATGAAACGGACGTCTTCGTCCTTAACAACACCAGGCC
ACCGCTGGGCAATTGGTTCGGTTGTACCTGGATGAATTCAACTGGATTCACCAAAGTGTGCGGAGCGCCTCCTTGTGTCATCGGAGGAGTGGG
CAACGACACCTTGTACTGCCCCACTGATTGTTTCCGCAAGCATCCGGAAGCCACATATTCCCGGTGCGGCTCCGGTCCCTGGATTACACCCAG
ATGCCTGGTTGACTACCCGTATAGGCTTTGGCATTATCCTTGTACCGTCAACTACACCATATTCAAAGTCAGGATGTATGTGGGAGGGGTCGA
GCATAGGCTGGATGCTGCCTGCAACTGGACGCGGGGCGAACGTTGCGATCTGGAAGACAGGGACAGGTCCGAGCTCAGCCCGTTGCTGCTGTC
CACTACACAGTGGCAGGTCCTTCCGTGCTCCTTCACGACCTTGCCAGCCTTGTCCACCGGCCTCATCCACCTCCACCAGAACATTGTGGACGT
GCAGTACCTGTACGGGGTAGGGTCAAGCATCGCGTCCTGGGCCATTAAGTGGGAGTACGTCGTTCTCCTGTTCCTTCTGCTTGCAGACGCGCG
CGTCTGCTCCTGCCTGTGGATGATGCTACTCATATCCCAAGCGGAGGCGGCTTTGGAGAACCTCGTAATACTCAATGCAGCATCCCTGGCCGG
GACGCAAGGTCTTGTATCCTTCCTCGTGTTCTTCTGCTTTGCGTGGTATCTGAAGGGTAGGTGGGTGCCAGGAGCGGTTTACGCCCTCTACGG
AATGTGGCCTCTCCTCCTGCTCCTGTTGGCGTTGCCCCAGCGGGCATACGCGCTGGACACGGAGGTGGCCGCGTCGTGTGGCGGCGTTGTTCT
TGTCGGGTTGATGATGCTGACTCTGTCACCGTATTACAAGCGCTATATCAGCTGGTGCTTATGGTGGCTTCAGTATTTTCTGACTAGGGCAGA
AGCGCAACTGCACGTGTGGGTTCCCCCCCTCAACGTTCGAGGGGGGCGCGACGCTGCCATCTTACTCACATGCGTTGTACACCCGACTCTGGT
ATTTGACATCACCAAACTACTGCTGGCTGTCCTCGGACCCCTTTGGATTCTTCAAGCCAGTTTGCTTAAAGTACCCTACTTCGTGCGCGTCCA
AGGCCTTCTCCGGATCTGCGCGTTAGCGCGGAAGATGGTCGGAGGCCACTACGTGCAAATGGTTATCATCAAGTTAGGGATGCTTACTGGCAC
CTATGTTTATAACCATCTCACCCCCCTCCGGGACTGGGCGCACAACGGCCTGCGAGATCTGGCCGTGGCTGTAGAACCAGTCGTCTTCTCCCA
AATGGAGACCAAGCTCATCACGTGGGGGGCAGACACTGCCGCGTGCGGTGACATCATCAACGGCTTGCCCGTCTCCGCCCGTAGGGGCCAGGA
GATACTGCTCGGACCAGCCGATGGAATGGTCTCCAAGGGGTGGAGGTTGCTGGCGCCCATCACGGCGTACGCCCAGCAGACAAGGGGCCTCCT
AGGGTGCATAATCACCAGCCTAACCGGCCGGGATAAAAACCAAGTGGAGGGTGAGGTCCAGATTGTGTCAACTGCTGCCCAAACTTTCCTGGC
AACGTGCATCAGTGGGGTATGCTGGACTGTCTACCACGGGGCCGGAACGAGGACTATTGCATCATCCAAAGGCCCTGTTATCCAGATGTATAC
CAATGTGGACAAAGACCTTGTGGGCTGGCCCGCTCCTCAAGGTGCCCGCTCATTGACACCCTGCACCTGCGGCTCCTCGGACCTTTACCTGGT
CACGAGGCATGCCGATGTCATCCCCGTGCGCCGGCGGGGTGATAGCAGGGGCAGCCTGCTCTCGCCCCGGCCCATTTCCTATCTGAAAGGCTC
CTCGGGGGGCCCGCTGTTGTGCCCCGCGGGACACGCCGTAGGCATATTCAGGGCCGCGGTGTGCACCCGTGGAGTGGCTAAGGCGGTGGACTT
TATCCCTGTGGAGAACCTAGAGACAACCATGAGGTCCCCGGTGTTCACGGACAACTCCTCTCCGCCAGCAGTGCCCCAGAGCTTCCAGGTGGC
CCACCTGCATGCTCCCACAGGCAGCGGCAAGAGCACCAAGGTCCCGGCTGCGTATGCGGCTCAGGGCTATAAGGTGCTAGTACTCAACCCCTC
TGTCGCTGCAACACTGGGCTTTGGTGCTTATATGTCCAAGGCCCATGGGATCGATCCTAATATCAGGACCGGGGCGAGAACAATTACCACTGG
CAGCCCCATCACGTACTCCACCTACGGCAAATTTCTTGCCGACGGCGGGTGCTCGGGGGGCGCTTATGATATAATAATTTGTGACGAGTGCCA
TTCCACGGATGCCACATCCATCTTGGGCATCGGCACTGTCCTTGACCAGGCAGAGACCGCGGGGGCGAGACTGGTTGTGCTCGCCACCGCCAC
CCCTCCGGGCTCCGTCACTGTGCCCCATCCTAACATCGAGGAGGTTGCTCTGTCCACCACCGGAGAGATTCCTTTCTATGGCAAGGCTATCCC
CCTCGAAGTAATCAAAGGGGGGAGACATCTCATTTTTTGTCACTCAAAGAAGAAGTGCGACGAGCTCGCCGCAAAGCTAGTCGCATTGGGCAT
CAATGCCGTGGCCTACTACCGCGGTCTTGACGTGTCCGTCATCCCGACCAGCGGCGATGTTGTCGTCGTGGCAACTGATGCTCTCATGACCGG
CTTTACCGGCGACTTCGACTCGGTGATAGACTGCAACACGTGTGTCACCCAGACGGTCGACTTCAGCCTTGACCCTACTTTCACCATTGAGAC
AACCACGCTTCCCCAGGATGCTGTCTCCCGCACTCAACGTCGGGGTAGGACTGGCAGGGGGAAGCCAGGCATCTACAGATTTGTGGCACCGGG
GGAGCGCCCCTCCGGCATGTTCGACTCGTCCATCCTCTGTGAGTGCTATGACGCGGGCTGTGCTTGGTATGAGCTCACGCCCGCCGAGACTAC
AGTTAGACTACGAGCGTACATGAACACCCCGGGGCTTCCCGTGTGCCAAGACCATCTTGAATTTTGGGAGGGCGTCTTCACAGGCCTCACTCA
TATAGATGCCCACTTCCTATCCCAAACAAAGCAGAGTGGGGAGAATCTTCCTTACCTGGTAGCGTACCAAGCCACCGTGTGCGCTAGGGCTCA
AGCCCCTCCCCCATCGTGGGACCAGATGTGGAAGTGTTTGATCCGCCTCAAACCCACCCTCCATGGGCCAACACCTCTGCTATACAGACTGGG
CGCTGTCCAGAATGAGGTCACCCTGACGCACCCAGTCACCAAATACATTATGA
Donor 66747/ Panel Number 10012/ Transmitted Variant #2 (SEQ ID NO: 6)
TCGCCCACAGGACGTTAAGTTCCCGGGTGGCGGTCAGATCGTTGGTGGAGTTTACTTGTTGCCGCGCAGGGGCCCTAGAATGGGTGTGCGCGC
GCCGAGGAAGACTTCCGAGCGGTCGCAACCTCGAGGTAGACGTCAGCCTATCCCCAAGGCACGTCGGCCCGAGGGTAGGACCTGGGCTCAGCC
CGGGTACCCTTGGCCCCTCTATGGCAATGAGGGCTGCGGGTGGGCGGGATGGCTCCTGTCTCCCCGCGGCTCTCGGCCTAGTTGGGGCCCCAC
AGACCCCCGGCGTAGGTCGCGCAATTTGGGTAAGGTCATCGATACCCTTACGTGCGGCTTCGCCGACCTCATGGGGTACATACCGCTCGTCGG
CGCCCCTCTTGGAGGCGCTGCCAGGGCCCTGGCGCATGGCGTCCGGGTTCTGGAAGACGGCGTGAACTATGCAACGGGGAACCTTCCCGGTTG
CTCTTTCTCTATCTTCCTTCTGGCCCTGCTCTCTTGTCTGACTGTGCCCGCTTCGGCCTACCAAGTGCGCAACTCCACGGGGCTTTACCACGT
CACCAATGATTGCCCCAACTCGAGTATTGTGTACGAGGCGCCTGATGCCATCCTGCACACTCCGGGGTGTGTCCCTTGCGTTCGCGAGGGTAA
CGCCTCGAGGTGTTGGGTGGCGATGACCCCCACGGTGGCCACCAGGGACGGCAAACTCCCTGCAACGCAGCTCCGACGTCACATCGATCTGCT
TGTCGGGAGTGCCACCCTCTGTTCGGCCCTCTACGTGGGGGACCTGTGCGGGTCTGTCTTTCTTGTTGGTCAACTGTTTACCTTCTCTCCCAG
GCGCCACTGGACGACGCAAGACTGCAATTGTTCTATCTATCCCGGCCATATAACGGGCCACCGCATGGCATGGGATATGATGATGAACTGGTC
CCCGACGACGGCGTTGGTAATGGCTCAGCTGCTCCGGATCCCGCAAGCCATCTTGGATATGATCGCTGGTGCCCACTGGGGAGTCCTGGCGGG
CATAGCGTATTTCTCCATGGTGGGGAACTGGGCGAAGGTCCTGGTAGTGCTGCTGCTATTTGCCGGCGTCGATGCGGGAACCGTCGTCACCGG
AGGGGTCGCCGCCCGCACCGCGTATGGATTTACTAGTCTCTTCACGCGAGGCGCCCAGCAGAACATCCAGCTGATCAACACCAACGGCAGTTG
GCACATCAATAGGACGGCCTTGAACTGCAACGACAGCCTTAACACCGGCTGGTTAGCAGGGCTTTTCTATCGGAACAACTTCAACTCTTCAGG
CTGTCCTCAGAGGTTGGCCAGCTGCCGGCGCCTTGCCGATTTTGCCCAGGGCTGGGGCCCTATCAGCCATGCCAACGGCAGCGGCCCCGACCA
CCGCCCCTACTGCTGGCACTACCCCCCAAAACCTTGCGGCATTGTGCCCGCACAGAACGTGTGTGGCCCGGTATATTGCTTCACTCCCAGCCC
CGTGGCGGTGGGAACGACCGACAGGGCGGGCATCCCTACCTACAGCTGGGGTGAAAATGATACGGACGTCTTCGTCCTTAACAACACCAGGCC
ACCGCTGGGCAATTGGTTTGGTTGCACCTGGATGAACTCAACTGGATTCACCAAAGTGTGTGGAGCGCCCCCTTGTGTCATCGGAGGGGTGGG
CAACAACACCTTGCACTGCCCCACTGATTGTTTCCGCAAGCATCCGGAAGCCACATACTCCCGGTGCGGCTCCGGTCCCTGGATTACACCCAG
ATGCCTGGTCGACTACCCGTATAGGCTTTGGCATTATCCTTGTACCATCAACTATACCATATTCAAAGTCAGGATGTATGTGGGAGGGGTCGA
GCATAGGCTGGATGCTGCCTGCAACTGGACGCGGGGCGAACGTTGCGATCTGGAAGACAGGGACAGGTCCGAGCTCAGCCCGTTGCTGCTGTC
CACTACACAGTGGCAGGTCCTTCCGTGTTCCTTCACGACCTTGCCAGCCTTGTCCACCGGTCTCATCCACCTCCACCAGAACATCGTGGACGT
GCAGTACCTGTACGGGGTGGGGTCAAGCATCGCGTCCTGGGCCATCAAGTGGGAGTACGTCGTTCTCCTGTTCCTTCTGCTTGCAGACGCGCG
CGTCTGCTCCTGCCTGTGGATGATGCTACTCATATCCCAAGCGGAGGCGGCTTTGGAGAACCTCGTAATACTCAATGCAGCATCCCTGGCCGG
GACGCAAGGTCTTGTATCCTTCCTCGTGTTCTTCTGCTTTGCATGGTATCTGAAGGGTAGGTGGGTGCCAGGAGCGGTTTACGCCCTCTACGG
AATGTGGCCTCTCCTCCTGCTCCTGCTGGCGTTGCCCCAGCGGGCATACGCGCTGGACACGGAGGTGGCCGCGTCGTGTGGCGGCGTTGTTCT
CGTCGGGTTGATGGCGCTGACTCTGTCACCGTATTACAAGCGCTACATCAGCTGGTGCTTATGGTGGCTCCAGTATTTTCTGACTAGAGCAGA
AGCGCAACTGCACGTGTGGGTTCCCCCCCTCAACGTTCGAGGGGGGCGCGACGCCGTCATCTTACTCATGTGTGTTGTACACCCGACTTTGGT
ATTTGACATCACCAAACTACTGCTGGCCGTCCTCGGACCCCTTTGGATTCTTCAAGCCAGTTTGCTTAAAGTACCCTACTTCGTGCGCGTCCA
AGGCCTTCTCCGGATCTGCGCGTTAGCGCGGAAGATGGTCGGGGGCCAATACGTGCAAATGGTTATCATCAAGTTAGGGACGCTTACTGGCAC
CTATGTTTACAACCATCTCACTCCTCTTCGGGACTGGGCGCACAACGGCCTGCGAGATCTGGCCGTGGCTGTAGAGCCAGTCGTCTTCTCCCA
AATGGAGACCAAGCTCATCACGTGGGGGGCAGACACTGCCGCGTGCGGTGACATCATCAACGGTCTGCCCGTCTCCGCCCGTAGGGGTCGGGA
GATACTGCTCGGACCAGCCGATGGAATGGTCTCCAAGGGGTGGAGGTTGCTGGCGCCCATCACGGCGTACGCCCAGCAGACAAGGGGCCTCCT
AGGGTGCATAATCACCAGCCTAACCGGCCGGGACAAAAACCAAGTGGAGGGTGAGGTCCAGATTGTGTCAACTGCTGCCCAAACTTTCCTGGC
AACGTGCATCAGTGGGGTATGCTGGACTGTCTACCACGGGGCCGGAACGAGGACTATTGCATCATCCAAAGGCCCCGTTATCCAGATGTATAC
CAATGTGGACAAAGACCTTGTGGGCTGGCCCGCTCCTCAAGGTGCCCGCTCATTGACACCCTGCACCTGCGGCTCCTCGGACCTTTACCTGGT
CACGAGGCATGCCGATGTCATCCCCGTGCGCCGGCGGGGTGATAGCAGGGGCAGCCTGCTCTCGCCCCGGCCCATTTCCTACTTGAAAGGCTC
CTCGGGGGGCCCGCTGTTGTGCCCCGCGGGACACGCCGTAGGCATATTCAGGGCCGCGGTGTGCACCCGTGGAGTGGCTAAGGCGGTGGACTT
TATCCCTGTGGAGAACCTAGAGACAACCATGAGGTCCCCGGTGTTCACGGACAACTCCTCTCCGCCAGCAGTGCCCCAGAGCTTCCAGGTGGC
CCACCTGCATGCTCCCACAGGCAGCGGCAAGAGCACCAAGGTCCCGGCTGCATACGCGGCTCAGGGCTATAAGGTGCTAGTGCTCAACCCTTC
TGTTGCTGCAACATTGGGCTTTGGTGCTTACATGTCCAAGGCCCACGGGATCGATCCTAATATCAGGACCGGGGCGAGAACAATTACTACTGG
CAGCCCCATCACGTACTCCACCTACGGTAAGTTCCTTGCCGACGGCGGGTGCTCGGGGGGCGCTTATGATATAATAATTTGTGACGAGTGCCA
CTCCACGGATGCCACATCCATCTTGGGCATCGGCACTGTCCTTGACCAGGCAGAGACCGCGGGGGCGAGACTGGTTGTGCTCGCCACCGCCAC
CCCTCCGGGCTCCGTCACTGTGCCCCACCCCAACATTGAGGAGGTTGCTCTGTCCACCACCGGAGAGATTCCTTTCTATGGCAAGGCTATCCC
CCTCGAAGTAATCAAAGGGGGGAGACATCTCATTTTTTGTCACTCAAAGAAGAAGTGCGACGAGCTCGCCGCAAAGCTGGTCGCATTGGGCAT
CAATGCCGTGGCCTACTACCGCGGTCTTGATGTGTCTGTCATCCCGACCAGCGGCGATGTTGTCGTCGTGGCAACTGATGCTCTCATGACCGG
CTTTACCGGCGACTTCGACTCGGTGATAGACTGCAACACGTGTGTCACCCAGACGGTCGATTTCAGCCTTGACCCTACCTTCACCATTGAGAC
AACCACGCTTCCCCAAGACGCTGTCTCCCGCACTCAACGTCGGGGCAGGACTGGCAGGGGGAAGCCAGGCATCTACAGATTTGTGGCACCGGG
GGAGCGCCCTTCCGGCATGTTCGACTCGTCCGTCCTCTGTGAGTGCTATGACGCGGGCTGTGCTTGGTATGAGCTCACGCCCGCCGAGACTAC
AGTTAGACTACGAGCGTACATGAACACCCCGGGGCTTCCCGTGTGCCAAGACCATCTCGAATTTTGGGAGGGCGTCTTCACAGGCCTCACTCA
TATAGATGCCCACTTCCTATCCCAGACAAAGCAGAGTGGGGAGAATCTTCCTTACCTGGTAGCGTACCAAGCCACCGTGTGCGCTAGGGCTCA
AGCCCCTCCCCCATCGTGGGACCAGATGTGGAAGTGTTTGATCCGCCTCAAACCCACCCTCCATGGGCCAACACCTCTGCTATACAGACTGGG
CGCTGTCCAGAATGAGGTCACCTTGACGCACCCAGTCACTAAATACATCATGA
Donor 66747/ Panel Number 10012/ Transmitted Variant #3 (SEQ ID NO: 7)
TCGCCCACAGGACGTTAAGTTCCCGGGTGGCGGTCAGATCGTTGGTGGAGTTTACTTGTTGCCGCGCAGGGGCCCTAGAATGGGTGTGCGCGC
GCCGAGGAAGACTTCCGAGCGGTCGCAACCTCGAGGTAGACGTCAGCCTATCCCCAAGGCACGTCGGCCCGAGGGCAGGACCTGGGCTCAGCC
CGGGTACCCTTGGCCCCTCTATGGCAATGAGGGCTGCGGGTGGGCGGGATGGCTCCTGTCTCCCCGCGGCTCTCGGCCTAGTTGGGGCCCCAC
AGACCCCCGGCGTAGGTCGCGCAATTTGGGTAAGGTCATCGATACCCTTACGTGCGGCTTCGCCGACCTCATGGGGTACATACCGCTCGTCGG
CGCCCCTCTTGGAGGCGCTGCCAGGGCCCTGGCGCATGGCGTCCGGGTCCTGGAAGACGGCGTGAACTATGCAACAGGGAACCTTCCTGGTTG
CTCTTTCTCTATCTTCCTTCTGGCCCTGCTCTCTTGTCTGACTGTGCCCGCTTCGGCCTACCAAGTGCGCAACTCCACGGGGCTCTATCACGT
CACCAATGATTGCCCTAACTCGAGTATTGTGTACGAGGCGCCTGATGCCATCCTGCACACTCCGGGGTGTGTCCCTTGCGTTCGCGAGGGTAA
TGCCTCGAGGTGTTGGGTGGCGATGACCCCCACGGTGGCCACCAGGGACGGCAAACTCCCTGCGACGCAGCTCCGACGTCACATCGATCTGCT
TGTCGGGAGCGCCACCCTCTGTTCGGCCCTCTACGTGGGGGACCTGTGCGGGTCTGTCTTTCTTGTTGGTCAACTGTTTACCTTCTCTCCCAG
GCGCCACTGGACGACGCAAGACTGCAATTGTTCTATCTATCCCGGCCATATAACGGGCCACCGCATGGCATGGGATATGATGATGAACTGGTC
CCCGACGACAGCGTTGGTAATGGCTCAGCTGCTCCGGATCCCGCAAGCCATCTTGGACATGATCGCTGGTGCTCACTGGGGAGTCCTGGCGGG
CATAGCGTATTTCTCCATGGTGGGGAACTGGGCGAAGGTCCTGGTAGTGCTGTTGCTATTCGCCGGCGTCGATGCGGAAACCGTCGTCACCGG
GGGGACCGCCGCCCGCAACGCGTACGGACTCTCTAGTCTCTTCATGCGGGGCCCCAAGCAGAACATCCAGCTGATCAACACCAACGGCAGTTG
GCACATCAATAGGACGGCCTTGAACTGCAACGATAGCCTTAACACCGGCTGGCTAGCAGGGCTTTTCTATCAGCACAACTTCAACTCTTCAGG
CTGTCCTGAGAGGCTGGCCAGCTGCCGACGCCTTGCCGATTTTGCCCAGGGCTGGGGCCCTATCAGCCATGCCAACGGCAGCGGCCCCGACCA
CCGCCCCTACTGCTGGCACTACCCCCCAAAACCTTGCGGTATTGTGCCCGCACAGAACGTGTGTGGTCCGGTATATTGCTTCACTCCCAGCCC
CGTGGCGGTGGGAACGACCGACAGGTCGGGCGTCCCTACCTACCGCTGGGGTGAAAATGAGACGGACGTCTTCGTCCTTAACAACACCAGGCC
ACCGCTGGGCAATTGGTTTGGTTGTACCTGGATGAACTCAACTGGATTCACCAAAGTGTGCGGAGCGCCTCCTTGTGTCATCGGAGGGGCGGG
CAACAACACCTTGCACTGCCCCACCGATTGTTTCCGCAAGCATCCGGAAGCCACATACTCCCGGTGCGGCTCCGGTCCCTGGATTACACCCAG
ATGCATGGTCGACTACCCGTATAGGCTTTGGCATTATCCTTGTACCATCAACTATACCATATTTAAAGTCAGGATGTACGTGGGAGGGGTCGA
GCATAGGCTGGATGTTGCCTGCAACTGGACGCGGGGCGAACGCTGCGATCTGGAAGACAGGGACAGGTCCGAGCTCAGCCCGTTGCTGCTGTC
CACCACACAGTGGCAGGTCCTTCCGTGTTCCTTCACGACCTTGCCGGCCTTGTCCACCGGCCTCATCCACCTCCACCAGAACATCGTGGACGT
ACAGTACCTGTACGGGGTGGGGTCAAGCATTGCGTCCTGGGCCATTAAGTGGGAGTACGTCGTTCTCCTGTTCCTTCTGCTTGCAGACGCGCG
CGTCTGCTCCTGCCTGTGGATGATGCTACTCATATCCCAAGCGGAGGCGGCTTTGGAGAACCTCGTAACACTCAATGCAGCATCCCTGGCCGG
GACGCAAGGTCTTGTATCCTTCCTCGTGTTCTTCTGTTTCGCGTGGTATCTGAAGGGTAGGTGGGTGCCAGGAGCGGTTTACGCCCTCTACGG
GATGTGGCCTCTCCTCCTGCTCCTGTTGGCGTTGCCCCAGCGGGCATACGCGCTGGACACGGAGGTGGCCGCGTCGTGTGGCGGCGTTGTTCT
CGTCGGGTTGATGGCGCTGACTCTGTCACCGTATTACAAGCGCTACATCAGCTGGTGCTTATGGTGGCTCCAGTATTTTCTGACTAGAGCAGA
AGCGCAACTGCACGTATGGGTTCCCCCCCTCAACGCTCGAGGGGGGCGCGACGCTGTCATCTTACTCATGTGTGTTGTACACCCGACTTTGGT
ATTTGACATCACCAAACTACTGCTGGCCGTCCTCGGACCCCTTTGGATTCTTCAAGCCAGTCTGCTTAAAGTACCCTACTTTGTGCGCGTCCA
GGGCCTTCTCCGGATCTGCGCGTTAGCGCGGAAGATGGTTGGGGGCCACTACGTGCAAATGGTTATCATCAAGCTAGGGACGCTTACTGGCAC
CTATGTTTACAACCATCTCACTCCTCTTCGGGACTGGGCGCACAACGGCCTGCGAGATCTGGCCGTGGCTGTAGAGCCAGTCGTCTTCTCCCA
AATGGAGACCAAGCTCATCACATGGGGGGCAGACACTGCCGCGTGCGGTGACATCATCAACGGCTTGCCCGTCTCCGCCCGTAGGGGCCGGGA
GATACTGCTCGGACCAGCCGATGGAATGGTCTCCAAGGGGTGGAGGTTGCTGGCGCCCATCACGGCGTACGCCCAGCAGACAAGGGGCCTCTT
AGGATGCATAATCACCAGCCTGACCGGCCGGGACAAAAACCAAGTGGAGGGTGAAGTCCAGATTGTGTCAACTGCTGCCCAAACTTTCCTCGC
AACGTGCATCAGTGGGGTATGCTGGACTGTCTACCACGGGGCCGGAACGAGGACTATTGCATCATCCAAAGGCCCTGTTATCCAGATGTATAC
CAATGTGGACAAAGACCTTGTGGGCTGGCCCGCCCCTCAAGGTGCCCGCTCATTGACGCCCTGCACCTGCGGCTCCTCGGACCTTTACCTGGT
CACGAGGCATGCCGATGTCATCCCCGTGCGCCGGCGGGGTGATAGCAGGGGCAGCCTGCTTTCGCCCCGGCCCATTTCCTATTTGAAAGGTTC
CTCGGGGGGCCCGCTGTTGTGCCCCGCGGGACACGCCGTAGGCATATTCAGGGCCGCGGTGTGCACCCGTGGAGTGGCTAAGGCGGTGGACTT
TATCCCCGTGGAGAACCTAGAGACAACCATGAGGTCCCCGGTGTTTACGGACAACTCCTCTCCGCCAGCAGTGCCCCAGAGCTTCCAGGTGGC
CCACCTGCATGCTCCCACGGGCAGCGGCAAGAGCACCAAGGTCCCAGCTGCATATGCGGCTCAGGGCTATAAAGTGCTAGTGCTCAACCCCTC
TGTTGCTGCAACACTGGGCTTTGGTGCTTATATGTCCAAGGCCCACGGGATTGATCCTAACATCAGGACCGGGGCGAGAACAATTACCACTGG
CAGCCCCATCACGTACTCCACCTACGGCAAGTTCCTTGCCGACGGCGGGTGCTCGGGGGGCGCCTATGATATAATAATTTGTGACGAGTGCCA
CTCCACGGATGCCACATCCATCTTGGGCATCGGCACTGTCCTTGACCAGGCAGAGACCGCGGGGGCGAGACTAGTTGTGCTCGCCACCGCCAC
CCCTCCGGGCTCCATCACTGTGCCCCATCCTAACATCGAGGAGGTTGCTCTGTCCACCACCGGAGAGATTCCTTTCTATGGCAAGGCTATCCC
CCTCGAAGTAATCAAAGGGGGGAGACATCTCATTTTTTGTCACTCAAAGAAGAAGTGCGATGAGCTCGCCGCAAAGCTGGTCGCATTGGGCAT
CAATGCCGTGGCCTACTACCGCGGTCTTGACGTGTCCGTCATCCCGACCAGCGGCGATGTTGTCGTCGTGGCAACTGATGCTCTCATGACCGG
TTTTACCGGCGACTTCGACTCGGTGATAGACTGCAACACGTGTGTCACCCAGACGGTCGATTTCAGCCTTGACCCTACCTTCACCATTGAGAC
AACCACGCTTCCCCAAGATGCTGTCTCCCGCACTCAGCGTCGGGGCAGGACTGGCAGGGGGAAGCCAGGCATCTACAGGTTTGTGGCACCAGG
GGAGCGCCCTTCCGGCATGTTCGACTCGTCCATCCTCTGTGAGTGCTATGACGCGGGTTGTGCTTGGTATGAGCTCACACCCGCCGAGACTAC
AGTTAGACTACGAGCGTACATGAACACCCCGGGGCTTCCCGTGTGCCAAGACCATCTCGAATTTTGGGAGGGGGTCTTCACAGGCCTCACTCA
TATAGATGCCCACTTCCTATCCCAGACAAAGCAGAGTGGGGAGAATCTTCCTTACCTGGTAGCGTACCAAGCCACCGTGTGCGCTAGGGCTCA
AGCCCCTCCCCCATCGTGGGACCAGATGTGGAAGTGTTTGATCCGCCTCAAACCCACCCTTCATGGGCCAACACCTCTGCTATACAGACTGGG
TGCTGTCCAGAATGAGGTCACCCTGACGCACCCAGTCACCAAATATATCATGA
Donor 67539/ Panel Number 10029/ Transmitted Variant #1 (SEQ ID NO: 8)
TCACTCCCCTGTGAGGAACTACTGTCTTCACGCAGAAAGCGTCTAGCCATGGCGTTAGTATGAGTGTCGTGCAGCCTCCAGGACCCCCCCTCC
CGGGAGAGCCATAGTGGTCTGCGGAACCGGTGAGTACACCGGAATTGCCAGGACGACCGGGTCCTTTCTTGGATAAACCCGCTCAATGCCTGG
AGATTTGGGCGTGCCCCCGCAAGACTGCTAGCCGAGTAGTGTTGGGTCGCGAAAGGCCTTGTGGTACTGCCTGATAGGGTGCTTGCGAGTGCC
CCGGGAGGTCTCGTAGACCGTGCACCATGAGCACGAATCCTAAACCTCAAAGAAAAACCAAACGTAACACCAACCGTCGCCCACAGGACGTCA
AGTTCCCGGGTGGCGGTCAGATCGTTGGTGGAGTTTACTTGTTGCCGCGCAGGGGCCCTAGATTGGGTGTGCGCGCGACGAGGAAGACTTCCG
AGCGGTCGCAACCTCGAGGTAGACGTCAGCCTATCCCCAAGGCACGTCGGCCCGAGGGCAGGACCTGGGCTCAGCCCGGGTACCCCTGGCCCC
TCTATGGCAATGAGGGCTGCGGGTGGGCGGGATGGCTCCTGTCTCCCCGTGGCTCTCGGCCTAACTGGGGCCCCACAGACCCCCGGCGTAGGT
CGCGTAATTTGGGTAAGGTCATCGATACCCTTACATGCGGCTTCGCCGACCTCATGGGGTACATACCGCTCGTCGGCGCCCCTCTTGGGGGCG
CTGCCAGGGCCCTGGCGCATGGCGTCCGGGTTCTGGAAGACGGCGTGAACTATGCAACAGGGAACCTTCCTGGTTGCTCTTTCTCTATCTTCC
TTCTGGCTTTGCTCTCTTGCCTGACTGTGCCTGCTTCAGCCTACCAAGTGCGCAACTCCACGGGGCTTTATCATGTCACCAATGATTGCCCTA
ACTCGAGTATTGTGTACGAGGCGGACGATGCTATCCTGCACACTCCGGGGTGTGTCCCTTGCGTCCGCGAGGGTAACGGCTCGAGGTGTTGGG
TGGCGATAACCCCCACGGTGGCCACCAGGGACGGCAAACTCCCCACAGTGCAGCTTCGACGTCACATCGATCTGCTCGTCGGGAGCGCTACCC
TTTGTTCGGCCCTTTACGTGGGGGACCTGTGCGGGTCTGTCTTTCTTGTCGGCCAACTGTTCACCTTCTCTCCCAGGCGCCACTGGACAACGC
AGGACTGCAATTGTTCCATCTATCCCGGCCATATAACGGGTCACCGTATGGCATGGGACATGATGATGAACTGGTCCCCTACGACGGCGCTGG
TAGTAGCTCAGATGCTCCGGATCCCACAAGCCATCCTGGACATGATCGCTGGTGCTCACTGGGGAGTCCTGGCGGGCATAGCGTATTTCTCCA
TGGTGGGGAACTGGGCGAAGGTCCTGGTAGTGCTGCTGCTATTTGCCGGCGTCGACGCGGGAACCCACGTCACCGGGGGCATTGCCGCCCGTA
CCACGTCTAGAATTGCTGGTCTCTTCAACCCAGGCGCCCAGCAGGACATCCAGCTGGTTAACACCAACGGCAGTTGGCACATCAACAGAACGG
CCTTGAACTGTAACGATAGCCTTCACACCGGCTGGATAGCGGGGCTTTTCTATCGCTACAAATTCAACTCTTCAGGCTGTCCCGAGAGGTTGG
CCAGCTGCCGACCCCTTACCGATTTTGCCCAGGGCTGGGGCCCTATTAGTTACGCCAACGGAAGCGGCCCCGACCAACGCCCCTACTGCTGGC
ACTATCCCCCAAAGCCTTGCGGCATTGTGCCCGCACAGAGCGTGTGTGGCCCGGTGTATTGCTTCACTCCCAGCCCCGTGGTGGTGGGAACGA
CCGACAAGGCGGGCGCGCCTACCTACAGATGGGGTGCAAACGATACGGACGTCTTCGTCCTTAACAACACCAGGCCACCACTGGGCAATTGGT
TCGGTTGCACCTGGATGAACTCAACTGGATACACCAAAGTGTGCGGGGCGCCCCCCTGCGTCATCGGAGGGGTGGGCAACAAGACCTTGCACT
GCCCCACCGATTGTTTCCGCAAGCATCCGGAAGCCACATACTCTCGGTGCGGCTCCGGTCCCTGGATTACACCCAGGTGTCTGGTCGACTATC
CGTATAGGCTTTGGCATTACCCTTGTACCATCAACTACACCGTGTTCAAAGTCAGGATGTACGTGGGAGGGGTCGAGCATAGGCTGGAGGCTG
CCTGCAACTGGACGCGGGGCGAACGTTGCAATCTGGAAGACAGGGACAGGTCCGAGCTCAGCCCGTTGCTGCTGTCCACCACACAGTGGCAAG
TCCTTCCGTGTTCCTTCACGACCCTGCCAGCCTTGTCCACCGGCCTCATCCACCTCCACCAGAACATTGTGGACGTGCAGTACTTATACGGGG
TGGGGTCAAGCATCGCGTCCTGGGCCATCAAGTGGGAGTACGTCGTTCTCCTATTCCTTCTGCTCGCAGACGCGCGCGTCTGCTCCTGCTTGT
GGATGATGTTACTCATATCCCAAGCGGAGGCGGCTTTGGAGAACCTCGTAGTGCTCAATGCAGCATCTTTGGCCGGGACACACGGTCTTGTGT
CCCTCCTCGTGTTCTTCTGCTTTGCGTGGTACCTGAAGGGTAGGTGGGTGCCCGGAGCGGTCTACGCCCTCTACGGGATGTGGCCTCTCCTCC
TGCTCCTATTGGCGTTGCCCCAGCGGGCATATGCGTTGGACACGGAGGTGGCCGCGTCGTGTGGCGGCGCTGTTCTTGTCGGGTTGATGGCGC
TGACTCTGTCACCATATTACAAGCGCTATGTCAGCTGGTGCTTATGGTGGCTTCAGTACTTTCTGACCAGAGCAGAAGCGCAACTGCACGTGT
GGGTTCCCCCTCTCGACGTCCGAGGGGGGCGCGACGCCGTCATCTTACTCATGTGTGCTGTACGCCCGGCTTTGGTGTTTGACATCACCAAGC
TGCTGCTGGCCGTCCTCGGACCCCTCTGGATTCTCCAAGCCAGTTTGCTTAAAGTGCCCTACTTTGTGCGCGTTCAAGGCCTTCTCCGGATCT
GCGCGCTAGCGCGGAAGATGGCGGGGGGTCATTACGTGCAAATGGTCATCATCAAGTTGGGGGCGCTCACTGGCACTTATGTGTATAACCATC
TCACTCCTCTTCGGGACTGGGCGCACAACGGCCTGCGAGATCTGGCTGTGGCTGTAGAGCCAGTCGTCTTCTCCCGAATGGAGACCAACCTCA
TCACGTGGGGGGCAGACACCGCCGCATGCGGCGACATCATCAACGGCTTGCCCGTCTCCGCCCGCAGGGGCCGGGAGATACTGCTCGGACCAG
CCGACGGAATGGTCTCCAAGGGGTGGAGGTTGCTGGCACCCATCACGGCATACGCCCAGCAGACAAGGGGCCTCCTAGGGTGTATAATCACCA
GCCTAACCGGCCGGGACAAAAATCAGGTGGAGGGTGAGGTCCAGATTGTGTCAACTGCTGCCCAAACCTTTCTGGCAACGTGCATCAATGGAG
TATGCTGGACCGTCTACCACGGGGCCGGAACGAGGACCATCGCATCACCCAAGGGTCCTGTTATCCAGATGTACACCAATGTAGATAAAGATC
TCGTGGGTTGGCCCGCTCCTCAAGGTTCCCGTTCTTTGGCACCCTGCACCTGCGGCTCCTCGGACCTTTATCTGGTCACGAGGCACGCCGATG
TCATTCCCGTGCGCCGGCGGGGTGATAGCAGGGGCAGCCTGCTTTCGCCCCGGCCCATTTCCTACTTGAAAGGCTCCTCGGGGGGTCCGCTGT
TGTGCCCCGCGGGGCACGCCGTGGGCATTTTCAGGGCCGCGGTGTGCACCCGTGGAGTGGCTAAGGCAGTGGACTTTATCCCTGTAGAGAACC
TAGAGACAACCATGAGGTCCCCGGTGTTCACGGACAACTCCTCTCCACCAGCAGTACCCCAGAGCTTCCAGGTGGCCCACCTGCATGCTCCCA
CAGGCAGCGGCAAGAGCACCAAGGTCCCAGCTGCATACGCAGCTCAGGGCTATAAGGTGCTAGTGCTCAACCCCTCTGTTGCTGCAACACTAG
GCTTCGGTGCTTATATGTCCAAGGCCCATGGGATCGACCCTAACATCAGGACCGGGGTGAGAACAATTACCACTGGCAGCCCCATCACGTACT
CCACCTACGGCAAGTTCCTTGCCGACGGCGGGTGCTCAGGGGGTGCTTATGACATAATAATCTGTGACGAGTGCCACTCCACGGATGCCACGT
CCATCTTAGGCATCGGCACCGTCCTTGACCAAGCAGAGACCGCAGGGGCGAGGCTTGTTGTGCTCGCCACCGCTACCCCTCCGGGCTCCATCA
CTGTGCCCCATCCTAACATCGAGGAGGTTGCTCTGTCCACCACCGGAGAGATCCCCTTTTATGGCAAGGCTATCCCCCTCGAAGTAATCAAGG
GGGGGAGGCATCTCATCTTCTGTCATTCAAAGAAGAAGTGTGACGAGCTCGCTGCAAAGCTGGTTGCATTGGGCGTCAATGCCGTGGCCTATT
ACCGCGGTCTTGACGTGTCTGTCATCCCGACCAGCGGCGATGTTGTCGTCGTGGCAACTGATGCTCTCATGACCGGCTATACCGGCGACTTCG
ACTCGGTGATAGACTGCAACACGTGTGTCACCCAGACAGTCGATTTCAGCCTTGACCCCACCTTCACCATTGAGACAACCACGCTTCCCCAGG
ATGCTGTCTCCCGTACACAACGGCGGGGCAGGACTGGCAGGGGGAAGCCAGGCACCTACAGGTTTGTGGCACCGGGGGAGCGCCCCTCTGGCA
TGTTCGACTCGTCTGTCCTCTGTGAGTGCTATGACGCGGGCTGTGCTTGGTATGAGCTCACGCCCGCCGAGACCACAGTTAGGCTACGAGCGT
ACATGAACACCCCGGGGCTTCCCGTGTGCCAGGACCACCTTGAATTTTGGGAGGGCGTCTTTACGGGCCTTACCCATATAGATGCCCACTTCC
TATCCCAGACAAAGCAGAGTGGGGAGAACCTTCCTTACCTGGTAGCGTACCAAGCCACCGTGTGCGCTAGGGCTCAAGCCCCTCCCCCGTCGT
GGGACCAGATGTGGAAGTGTTTAGTCCGCCTCAAGCCCACCCTCCATGGGCCAACACCCCTGCTATACAGATTGGGCGCTGTTCAGAATGAAG
TCACCCTGACACACCCAATCACAAAATACATCATGACATGTATGTCGGCTGA
Donor 67539/ Panel Number 10029/ Transmitted Variant #2 (SEQ ID NO: 9)
TCGCCCACAGGACGTCAAGTTCCCGGGTGGCGGTCAGATCGTTGGTGGAGTTTACTTGTTGCCGCGCAGGGGCCCTAGATTGGGTGTGCGCGC
GACGAGGAAGACTTCCGAGCGGTCGCAACCTCGAGGTAGACGTCAGCCTATCCCCAAGGCACGTCGGCCCGAGGGCAGGACCTGGGCTCAGCC
CGGGTACCCCTGGCCCCTCTATGGCAATGAGGGCTGCGGGTGGGCGGGATGGCTCCTGTCTCCCCGTGGCTCTCGGCCTAACTGGGGCCCCAC
AGACCCCCGGCGTAGGTCGCGTAATTTGGGTAAGGTCATCGATACCCTTACATGCGGCTTCGCCGACCTCATGGGGTACATACCGCTCGTCGG
CGCCCCTCTTGGGGGCGCTGCCAGGGCCCTGGCGCATGGCGTCCGGGTTCTGGAAGACGGCGTGAACTATGCAACAGGGAACCTTCCTGGTTG
CTCTTTCTCTATCTTCCTTCTGGCTTTGCTCTCTTGCCTGACTGTGCCTGTTTCAGCCTACCAAGTGCGCAACTCCACGGGGCTTTATCATGT
CACCAATGATTGCCCTAATTCGAGTATTGTGTACGAGGCGGACGATGCTATCCTGCACACTCCGGGGTGTGTCCCTTGCGTCCGCGAGGGTAA
CGGCTCGAGGTGTTGGGTGGCGATAACCCCCACGGTGGCCACCAGGGACGGCAAACTCCCCACAGTGCAGCTTCGACGTCACATCGATCTGCT
TGTCGGGAGCGCTACCCTTTGTTCGGCCCTTTACGTGGGGGACCTGTGCGGGTCTGTCTTTCTTGTCGGCCAACTGTTCACCTTCTCTCCCAG
GCGCCACTGGACAACGCAGGACTGCAATTGTTCCATCTATCCCGGCCATATAACGGGTCACCGTATGGCATGGGACATGATGATGAACTGGTC
CCCTACGACGGCGCTGGTAGTAGCTCAGATGCTCCGGATCCCACAAGCCATCCTGGACATGATCGCTGGTGCTCACTGGGGAGTCCTGGCGGG
CATAGCGTATTTCTCCATGGTGGGGAACTGGGCGAAGGTCCTGGTAGTGCTGCTGCTATTTGCCGGCGTCGACGCGGGAACCCACGTCACCGG
GGGCATTGCCGCCCGTACCACGTCTAGAATTGCTGGTCTCTTCAACCCAGGCGCCCAGCAGGACATCCAGCTGGTTAACACCAACGGCAGTTG
GCACATCAACAGAACGGCCTTGAACTGTAACGATAGCCTTCACACCGGCTGGATAGCGGGGCTTTTCTATCGCTACAAATTCAACTCTTCAGG
CTGTCCCGAGAGGTTGGCCAGCTGCCGACCCCTTACCGATTTTGCCCAGGGCTGGGGCCCTATTAGTTACGCCAACGGAAGCGGCCCCGACCA
ACGCCCCTACTGCTGGCACTATCCCCCAAAGCCTTGCGGCATTGTGCCCGCACAGAGCGTGTGTGGCCCGGTGTATTGCTTCACTCCCAGCCC
CGTGGTGGTGGGAACGACCGACAAGGCGGGCGCGCCTACCTACAGATGGGGTGCAAACGATACGGACGTCTTCGTCCTTAACAACACCAGGCC
ACCACTGGGCAATTGGTTCGGTTGCACCTGGATGAACTCAACTGGATACACCAAAGTGTGCGGGGCGCCCCCCTGCGTCATCGGAGGGGTGGG
CAACAAGACCTTGCACTGCCCCACCGATTGTTTCCGCAAGCATCCGGAAGCCACATACTCTCGGTGCGGCTCCGGTCCCTGGATTACACCCAG
GTGCCTGGTCGACTATCCGTATAGGCTTTGGCATTACCCTTGTACCATCAACTACACCGTGTTCAAAGTCAGGATGTACGTGGGAGGGGTCGA
GCATAGGCTAGAGGCTGCCTGCAACTGGACGCGGGGCGAACGTTGCAATCTGGAAGACAGGGACAGGTCCGAGCTCAGCCCGTTGCTGCTGTC
CACCACACAGTGGCAAGTCCTTCCGTGTTCCTTCACGACCCTGCCAGCCTTGTCCACCGGCCTCATCCACCTCCACCAGAACATTGTGGACGT
GCAGTACTTATACGGGGTGGGGTCAAGCATCGCGTCCTGGGCCATCAAGTGGGAGTACGTCGTTCTCCTATTCCTTCTGCTCGCAGACGCGCG
CGTCTGCTCCTGCTTGTGGATGATGTTACTCATATCCCAAGCGGAGGCGGCTTTGGAGAACCTCGTAGTGCTCAATGCAGCATCTTTGGCCGG
GACACACGGTCTTGTGTCCCTCCTCGTGTTCTTCTGCTTTGCGTGGTACCTGAAGGGTAGGTGGGTGCCCGGAGCGGTCTACGCCCTCTACGG
GATGTGGCCTCTCCTCCTGCTCCTATTGGCGTTGCCCCAGCGGGCATATGCGTTGGACACGGAGGTGGCCGCGTCGTGTGGCGGCGCTGTTCT
TGTCGGGTTGATGGCGCTGACTCTGTCACCATATTACAAGCGCTATGTCAGCTGGTGCTTATGGTGGCTTCAGTACTTTCTGACCAGAGCAGA
AGCGCAACTGCACGTGTGGGTTCCCCCTCTCGACGTCCGAGGGGGGCGCGACGCCGTCATCTTACTCATGTGTGCTGTACGCCCGACTTTGGT
GTTTGACATCACCAAGCTGCTGCTGGCCGTCCTCGGACCCCTCTGGATTCTCCAAGCCAGTTTGCTTAAAGTGCCCTACTTTGTGCGCGTTCA
AGGCCTTCTCCGGATCTGCGCGCTAGCGCGGAAGATGGCGGGGGGTCATTACGTGCAAATGGTCATCATCAAGTTGGGGGCGCTCACTGGCAC
TTATGTGTATAACCATCTCACTCCTCTTCGGGACTGGGCGCACAACGGCCTGCGAGATCTGGCTGTGGCTGTAGAGCCAGTCGTCTTCTCCCG
AATGGAGACCAACCTCATCACGTGGGGGGCAGACACCGCCGCATGCGGCGACATCATCAACGGCTTGCCCGTCTCCGCCCGCAGGGGCCGGGA
GATACTGCTCGGACCAGCCGACGGAATGGTCTCCAAGGGGTGGAGGTTGCTGGCACCCATCACGGCGTACGCCCAGCAGACAAGGGGCCTCCT
AGGGTGTATAATCACCAGCCTAACCGGCCGGGACAAAAATCAGGTGGAGGGTGAGGTCCAGATTGTGTCAACTGCTGCCCAAACCTTTCTGGC
AACGTGCATCAATGGAGTATGCTGGACCGTCTACCACGGGGCCGGAACGAGGACCATCGCATCACCCAAGGGTCCGGTTATCCAGATGTACAC
CAATGTAGACAAAGATCTTGTGGGTTGGCCCGCTCCTCAAGGTTCCCGTTCTTTGGCACCCTGCACCTGCGGCTCCTCGGACCTTTATCTGGT
CACGAGGCACGCCGATGTCATTCCCGTGCGCCGGCGGGGTGATAGCAGGGGCAGCCTGCTTTCGCCCCGGCCCATTTCCTACTTGAAAGGCTC
CTCGGGGGGTCCGCTGTTGTGCCCCGCGGGGCACGCCGTGGGCATTTTCAGGGCCGCGGTGTGCACCCGTGGAGTGGCTAAGGCAGTGGACTT
TATCCCTGTAGAGAACCTAGAGACAACCATGAGGTCCCCGGTGTTCACGGACAACTCCTCTCCACCAGCAGTACCCCAGAGCTTCCAGGTGGC
CCACCTGCATGCTCCCACAGGCAGCGGCAAGAGCACCAAGGTCCCAGCTGCATACGCAGCTCAGGGCTATAAGGTGCTAGTGCTCAACCCCTC
TGTTGCTGCAACACTAGGCTTCGGTGCTTATATGTCCAAGGCCCATGGGATCGACCCTAACATCAGGACCGGGGTGAGAACAATTACCACTGG
CAGCCCCATCACGTACTCCACCTACGGCAAGTTCCTTGCCGACGGCGGGTGCTCAGGGGGTGCTTATGACATAATAATCTGTGACGAGTGCCA
CTCCACGGATGCCACGTCCATCTTAGGCATCGGCACCGTCCTTGACCAAGCAGAGACCGCAGGGGCGAGGCTTGTTGTGCTCGCCACCGCTAC
CCCTCCGGGCTCCATCACCGTGCCCCATCCTAACATCGAGGAGGTTGCTCTGTCCACCACCGGAGAGATCCCCTTTTATGGCAAGGCTATCCC
CCTCGAAGTAATCAAGGGGGGGAGGCATCTCATCTTCTGTCATTCAAAGAAGAAGTGTGACGAGCTCGCTGCAAAGCTGGTTGCATTGGGCGT
CAATGCCGTGGCCTATTACCGCGGTCTTGACGTGTCTGTCATCCCGACCAGCGGCGATGTTGTCGTCGTGGCAACTGATGCTCTCATGACCGG
CTATACCGGCGACTTCGACTCGGTGATAGACTGCAACACGTGTGTCACCCAGACAGTCGATTTCAGCCTTGACCCCACCTTCACCATTGAGAC
AACCACGCTTCCCCAGGATGCTGTCTCCCGTACACAACGGCGGGGCAGGACTGGCAGGGGGAAGCCAGGCACCTACAGGTTTGTGGCACCGGG
GGAGCGCCCCTCTGGCATGTTCGACTCGTCTGTCCTCTGTGAGTGCTATGACGCGGGCTGTGCTTGGTATGAGCTCACGCCCGCCGAGACCAC
AGTTAGGCTACGAGCGTACATGAACACCCCGGGGCTTCCCGTGTGCCAGGACCACCTTGAATTTTGGGAGGGCGTCTTTACGGGCCTTACCCA
TATAGATGCCCACTTCCTATCCCAGACAAAGCAGAGTGGGGAGAACCTTCCTTACCTGGTAGCGTACCAAGCCACCGTGTGCGCTAGGGCTCA
AGCCCCTCCCCCATCGTGGGACCAGATGTGGAAGTGTTTAGTCCGCCTCAAGCCCACCCTCCATGGGCCAACACCCCTGCTATACAGATTGGG
CGCTGTTCAGAATGAAGTCACCCTGACACACCCAATCACAAAATACATCATGACATGTATGTCGGCTGA
Donor 67539/ Panel Number 10029/ Transmitted Variant #3 (SEQ ID NO: 10)
TCGCCCACAGGACGTCAAGTTCCCGGGTGGCGGTCAGATCGTTGGTGGAGTTTACTTGTTGCCGCGCAGGGGCCCTAGATTGGGTGTGCGCGC
GACGAGGAAGACTTCCGAGCGGTCGCAACCTCGAGGTAGACGTCAGCCTATCCCCAAGGCACGTCGGCCCGAGGGCAGGACCTGGGCTCAGCC
CGGGTACCCCTGGCCCCTCTATGGCAATGAAGGCTGCGGGTGGGCGGGATGGCTCCTGTCTCCCCGTGGCTCTCGGCCTAATTGGGGCCCCAC
AGACCCCCGGCGTAGGTCGCGTAATTTGGGTAAGGTCATCGATACCCTTACATGCGGCTTCGCCGACCTCATGGGGTACATACCGCTCGTCGG
CGCCCCTCTTGGGGGCGCTGCCAGGGCCCTGGCGCATGGCGTCCGGGTTCTGGAAGACGGCGTGAACTATGCAACAGGGAACCTTCCTGGTTG
CTCTTTCTCTATCTTCCTTCTGGCTTTGCTCTCTTGCCTGACTGTGCCTGCTTCAGCCTTCCAAGTGCGCAACTCCACGGGGCTTTATCATGT
CACCAATGATTGCCCTAACTCGAGTATTGTGTACGAGGCGGACGATGCTATCCTGCACACTCCGGGGTGTGTCCCTTGCGTCCGCGAGGGTAA
CGGCTCGAGGTGTTGGGTGGCGATAACCCCCACGGTGGCCACCAGGGACGGCAAACTCCCCACAGTGCAGCTTCGACGTCACATCGATCTGCT
TGTCGGGAGCGCTACCCTTTGTTCGGCCCTTTACGTGGGGGACCTGTGCGGGTCTGTCTTTCTTGTCGGCCAACTGTTCACCTTCTCTCCCAG
GCGCCACTGGACAACGCAGGACTGCAATTGTTCCATCTATCCCGGCCATATAACGGGTCACCGTATGGCATGGGACATGATGATGAACTGGTC
CCCTACGACGGCGCTGGTAGTAGCTCAGATGCTCCGGATCCCACAAGCCATCCTGGACATGATCGCTGGTGCTCACTGGGGAGTCCTGGCGGG
CATAGCGTATTTCTCCATGGTGGGGAACTGGGCGAAGGTCCTGGTAGTGCTGCTGCTATTTGCCGGCGTCGACGCGGGAACCCACGTCACCGG
GGGCATTGCCGCCCGTACCACGTCTGGAGTTGCTGGTCTCTTCAGCCCAGGCGCCCAGCAGGACATCCAGCTGGTTAACACCAACGGCAGTTG
GCACATCAACAGAACGGCCTTGAACTGTAACGATAGCCTTCACACCGGCTGGATAGCGGGGCTTTTCTATCGCTACAAATTCAACTCTTCAGG
CTGTCCCGAGAGGTTGGCCAGCTGCCGACCCCTTACCGATTTTGCCCAGGGCTGGGGCCCTATTAGTTACGCCAACGGAAGCGGCCCCGACCA
ACGCCCCTACTGCTGGCACTATCCCCCAAAGCCTTGCGGCATTGTGCCCGCACAGAGCGTGTGTGGCCCGGTGTATTGCTTCACTCCCAGCCC
CGTGGTGGTGGGAACGACCGACAAGGCGGGCGCGCCTACCTACAGATGGGGTGCAAACGATACGGACGTCTTCGTCCTTAACAACACCAGGCC
ACCACTGGGCAATTGGTTCGGTTGCACCTGGATGAACTCAACTGGATACACCAAAGTGTGCGGGGCGCCCCCCTGCGTCATCGGAGGGGTGGG
CAACAAGACCTTGCACTGCCCCACCGATTGTTTCCGCAAGCATCCGGAAGCCACATACTCTCGGTGCGGCTCCGGTCCCTGGATTACACCCAG
GTGTCTGGTCGACTATCCGTATAGGCTTTGGCATTACCCTTGTACCATCAACTACACCGTGTTCAAAGTCAGGATGTACGTGGGAGGGGTCGA
GCATAGGCTAGAGGCTGCCTGCAGCTGGACGCGGGGCGAACGTTGCAATCTGGAAGACAGGGACAGGTCCGAGCTCAGCCCGTTGCTGCTGTC
CACCACACAGTGGCAAGTCCTTCCGTGTTCCTTCACGACCCTGCCAGCCTTGTCCACCGGCCTCATCCACCTCCACCAGAACATTGTGGACGT
GCAGTACTTATACGGGGTGGGGTCAAGCATCGCGTCCTGGGCCATCAAGTGGGAGTACGTCGTTCTCCTATTCCTTCTGCTCGCAGACGCGCG
CGTCTGCTCCTGCTTGTGGATGATGTTACTCATATCCCAAGCGGAGGCGGCTTTGGAGAACCTCGTAGTGCTCAATGCAGCATCTTTGGCCGG
GACACACGGTCTTGTGTCCCTCCTCGTGTTCTTCTGCTTTGCGTGGTACCTGAAGGGTAGGTGGGTGCCCGGAGCGGTCTACGCCCTCTACGG
GATGTGGCCTCTCCTCCTGCTCCTATTGGCGTTGCCCCAGCGGGCATATGCGTTGGACACGGAGGTGGCCGCGTCGTGTGGCGGCGCTGTTCT
TGTCGGGTTGATGGCGCTGACTCTGTCACCATATTACAAGCGCTATGTCAGCTGGTGCTTATGGTGGCTTCAGTACTTTCTGACCAGAGCAGA
AGCGCAACTGCACGTGTGGGTTCCCCCTCTCGACGTCCGAGGGGGGCGCGACGCCGTCATCTTACTCATGTGTGCTGTACGCCCGACTTTGGT
GTTTGACATCACCAAGCTGCTGCTGGCCGTCCTCGGACCCCTCTGGATTCTCCAAGCCAGTTTGCTTAAAGTGCCCTACTTTGTGCGCGTTCA
AGGCCTTCTCCGGATCTGCGCGCTAGCGCGGAAGATGGCGGGGGGTCATTACGTGCAAATGGTCATCATCAAGTTGGGGGCGCTCACTGGCAC
TTATGTGTATAACCATCTCACTCCTCTTCGGGACTGGGCGCACAACGGCCTGCGAGATCTGGCTGTGGCTGTAGAGCCAGTCGTCTTCTCCCG
AATGGAGACCGACCTCATCACGTGGGGGGCAGACACCGCCGCATGCGGCGACGTCATCAACGGCTTGCCCGTCTCCGCCCGCAGGGGCCGGGA
GATACTGCTCGGACCAGCCGACGGAATGGTCTCCAAGGGGTGGAGGTTGCTGGCACCCATCACGGCATACGCCCAGCAGACAAGGGGCCTCCT
AGGGTGCATAATCACCAGCCTAACCGGCCGGGACAAAAATCAGGTGGAGGGTGAGGTCCAGATTGTGTCAACTGCTGCCCAAACCTTTCTGGC
GACGTGCATCAATGGAGTATGCTGGACCGTCTACCACGGGGCCGGAACGAGGACCATCGCATCACCCAAGGGTCCTGTTATCCAGATGTACAC
CAATGTAGACAAAGATCTTGTGGGTTGGCCCGCTCCTCAAGGTTCCCGTTCTTTGGCACCCTGCACCTGCGGCTCCTCGGACCTTTATCTGGT
CACGAGGCACGCCGATGTCATTCCCGTGCGCCGGCGGGGTGATAGCAGGGGCAGCCTGCTTTCGCCCCGGCCCATTTCCTACTTGAAAGGCTC
CTCGGGGGGTCCGCTGTTGTGCCCCGCGGGGCACGCCGTGGGCATTTTCAGGGCCGCGGTGTGCACCCGTGGAGTGGCTAAGGCAGTGGACTT
TATCCCTGTAGAGAACCTAGAGACAACCATGAGGTCCCCGGTGTTCACGGACAACTCCTCTCCACCAGCAGTACCCCAGAGCTTCCAGGTGGC
CCACCTGCATGCTCCCACAGGCAGCGGCAAGAGCACCAAGGTCCCAGCTGCATACGCAGCTCAGGGCTATAAGGTGCTAGTGCTCAACCCCTC
TGTTGCTGCAACACTAGGCTTCGGTGCTTATATGTCCAAGGCCCATGGGATCGACCCTAACATCAGGACCGGGGTGAGAACAATTACCACTGG
CAGCCCCATCACGTACTCCACCTACGGCAAGTTCCTTGCCGACGGCGGGTGCTCAGGGGGTGCTTATGACATAATAATCTGTGACGAGTGCCA
CTCCACGGATGCCACGTCCATCTTAGGCATCGGCACCGTCCTTGACCAAGCAGAGACCGCAGGGGCGAGGCTTGTTGTGCTCGCCACCGCTAC
CCCTCCGGGCTCCATCACCGTGCCCCATCCTAACATCGAGGAGGTTGCTCTGTCCACCACCGGAGAGATCCCCTTTTATGGCAAGGCTATCCC
CCTCGAAGTAATCAAGGGGGGGAGGCATCTCATCTTCTGTCATTCAAAGAAGAAGTGTGACGAGCTCGCTGCAAAGCTGGTTGCATTGGGCGT
CAATGCCGTGGCCTATTACCGCGGTCTCGACGTGTCTGTCATCCCGACCAGCGGCGATGTTGTCGTCGTGGCAACTGATGCTCTCATGACCGG
CTATACCGGCGACTTCGACTCGGTGATAGACTGCAACACGTGTGTCACCCAGACAGTCGATTTCAGCCTTGACCCCACCTTCACCATTGAGAC
AACCACGCTTCCCCAGGATGCTGTCTCCCGTACACAACGGCGGGGCAGGACTGGCAGGGGGAAGCCAGGCACCTACAGGTTTGTGGCACCGGG
GGAGCGCCCCTCTGGCATGTTCGACTCGTCTGTCCTCTGTGAGTGCTATGACGCGGGCTGTGCTTGGTATGAGCTCACGCCCGCCGAGACCAC
AGTTAGGCTACGAGCGTACATGAACACCCCGGGGCTTCCCGTGTGCCAGGACCACCTTGAATTTTGGGAGGGCGTCTTTACGGGCCTTACCCA
TATAGATGCCCACTTCCTATCCCAGACAAAGCAGAGTGGGGAGAACCTTCCTTACCTGGTAGCGTACCAAGCCACCGTGTGCGCTAGGGCTCA
AGCCCCTCCCCCATCGTGGGACCAGATGTGGAAGTGTTTAGTCCGCCTCAAGCCCACCCTCCATGGGCCAACACCCCTGCTATACAGATTGGG
CGCTGTTCAGAATGAAGTCACCCTGACACACCCAATCACAAAATACATCATGACATGTATGTCGGCTGA
Donor 67539/ Panel Number 10029/ Transmitted Variant #4 (SEQ ID NO: 11)
TCACTCCCCTGTGAGGAACTACTGTCTTCACGCAGAAAGCGCCTAGCCATGGCGTTAGTATGAGTGTCGTGCAGCCTCCAGGACCCCCCCTCC
CGGGAGAGCCATAGTGGTCTGCGGAACCGGTGAGTACACCGGAATTGCCAGGACGACCGGGTCCTTTCTTGGATAAACCCGCTCAATGCCTGG
AGATTTGGGCGTGCCCCCGCAAGACCGCTAGCCGAGTAGTGTTGGGTCGCGAAAGGCCTTGTGGTACTGCCTGATAGGGTGCTTGCGAGTGCC
CCGGGAGGTCTCGTAGACCGTGCACCATGAGCACGAATCCTAAACCTCAAAGAAAAACCAAACGTAACACCAACCGTCGCCCACAGGACGTCA
AGTTCCCGGGTGGCGGTCAGATCGTTGGTGGAGTTTACTTGTTGCCGCGCAGGGGCCCTAGATTGGGTGTGCGCGCGACGAGGAAGACTTCCG
AGCGGTCGCAACCTCGAGGCAGACGTCAGCCTATCCCCAAGGCACGTCGGCCCGAGGGCAGGACCTGGGCTCAGCCCGGGTACCCCTGGCCCC
TCTATGGCAATGAGGGCTGTGGGTGGGCGGGATGGCTCCTGTCTCCCCGTGGCTCTCGGCCTAGCTGGGGCCCCTCAGACCCCCGGCGTAGGT
CGCGTAATTTGGGTAAAGTCATCGATACCCTTACATGCGGCTTCGCCGACCTCATGGGGTACATACCGCTCGTCGGCGCCCCTCTTGGGGGCG
CTGCCAGGGCCCTGGCGCATGGCGTCCGGGTTCTGGAAGACGGCGTGAACTATGCAACAGGGAACCTTCCTGGTTGCTCTTTCTCTATCTTCC
TCCTGGCTTTGCTCTCTTGCCTGACTGTGCCTGCTTCAGCCTACCAAGTGCGCAACTCCACGGGGCTTTATCATGTCACCAATGATTGCCCTA
ACTCGAGTATTGTGTACGAGGCGGCCGATGCTATCCTGCACACTCCGGGGTGTGTCCCTTGCGTCTACGAGGGTAACGCCTCGAGGTGTTGGG
TGGCGATAACCCCCACGGTGGCCACCAGGGACGGCAAACTCCCCACAGTGCAGCTTCGACGTCACATCGATCTGCTTGTCGGGAGCGCCACCC
TTTGTTCGGCCCTTTACGTGGGGGACCTGTGCGGGTCTGTCTTTCTTGTCGGCCAACTGTTCACCTTCTCTCCCAGGCTCCACTGGACAACGC
AGGACTGCAATTGTTCCATCTACCCCGGCCATATAACGGGTCACCGTATGGCATGGGACATGATGATGAACTGGTCCCCTACGACGGCGCTGG
TAGTAGCTCAGATGCTCCGGATCCCGCAAGCCATCTTGGACATGATCGCTGGTGCTCACTGGGGAGTCCTAGCGGGCATAGCGTATTTCTCCA
TGGTGGGGAACTGGGCGAAGGTCCTAGTAGTGCTGCTGCTATTTGCCGGCGTCGACGCGGAAACCCACGTCACCGGGGGAGCTGCCGGCCGTA
CCATGGCTGGATTTACTGGTCTCTTTACACGAGGCGCCCAGCAGAGCATCCAGTTGGTTAACACCAACGGCAGTTGGCACATCAACAGAACGG
CTTTGAACTGCAACGATAGCCTTCAGACCGGCTGGATAGCGGGGCTTCTCTATCACAACAAATTCAACTCTTCAGGCTGTCCGGAGAGGTTGG
CCAGCTGCCGACCCCTTACCGATTTTGCCCAGGGCTGGGGCCCTATCAGTTACGCCAACGGAAGCGGCCCCGACCAACGCCCCTACTGCTGGC
ACTACCCCCCAAGGCCTTGCGGCATTGTGCCCGCACAGAGCGTATGTGGCCCGGTATATTGCTTCACTCCCAGTCCCGTGGTGGTGGGAACGA
CCGACAGGTCGGGCGCGCCTACCTACGGATGGGGTGCAAACGATACGGACGTCTTCGTCCTTAACAACACTAGGCCACCACTGGGCAATTGGT
TCGGTTGCACCTGGATGAACTCAACTGGATACACCAAAGTGTGCGGGGCGCCCCCCTGTGTCATCAGAGGGGTGGGCAACAACACCTTGCACT
GCCCCACCGATTGTTTCCGCAAGCATCCGGAAGCCACATACTCTCGGTGCGGCTCCGGTCCCTGGATTACACCCAGGTGCCTGGTCAACTACC
CGTATAGGCTTTGGCATTACCCTTGTACCATCAACTACACCGTATTCAAGGTCAGGATGTACGTGGGAGGGGTCGAGCATAGGCTAGAGGCTG
CCTGCAACTGGACGCGGGGCGAACGTTGCAGTCTGGAAGACAGGGACAGGTCCGAGCTCAGCCCGTTGCTGCTGTCCACCACACAGTGGCAGG
TCCTTCCCTGTTCCTTCACGACCCTGCCAGCCTTGTCCACCGGCCTCATCCACCTCCACCAGAACATTGTGGACGTGCAGTACTTATACGGGG
TGGGGTCAAGTATCGCGTCCTGGGCCATCAAGTGGGAGTACGTCGTTCTCCTATTCCTTCTGCTTGCAGACGCGCGCGTCTGCTCCTGCTTGT
GGATGATGTTGCTCATATCCCAAGCGGAGGCGGCCTTGGAGAACCTCGTAGTGCTCAATGCAGCATCTTTGGCCGGGACGCACGGTCTTGTGT
CCTTCCTCGTGTTCTTCTGCTTTGCGTGGTACCTGAAGGGTAGGTGGGTGCCCGGAGCGGCCTACGCCCTCTACGGGATGTGGCCTCTCCTCC
TGCTCCTGTTGGCGTTGCCCCAGCGGGCATACGCGTTGGACACGGAGGTGGCCGCGTCGTGTGGCGGCGCTGTTCTTGTCGGGTTGATGGCGC
TGACTCTGTCACCACATTACAAGCGATATGTCAGCTGGTGCTTGTGGTGGCTTCAGTACTTTCTGACCAGAGCAGAAGCGCAACTGCACGTGT
GGGTTCCCCCCCTCGACGTCCGAGGGGGGCGCGACGCCGTCATCTTACTCGTGTGTGCTGTACGCCCGACTTTGGTGTTTGACATCACCAAGC
TGCTGCTGGCCGTCTTCGGGCCCCTTTGGATTCTCCAAGCCAGTTTGCTTAAAGTACCCTACTTTGTGCGCGTTCAAGGCCTTCTCCGGATCT
GCGCGCTAGCGCGGAAGATGGCGGGGGGTCATTACGTGCAAATGGTCATCATCAAGCTAGGGGCGCTCACTGGCACCTATGTTTACAACCACC
TCACTCCTCTTCGGGACTGGGCGCACAACGGCCTGCGAGATCTGGCTGTGGCTGTAGAGCCAGTCGTCTTCTCCCGAATGGAGACCAACCTCA
TCACGTGGGGGGCAGACACCGCCGCGTGCGGTGACATCATCAACGGCTTGCCCGTCTCCGCCCGTAGGGGCCGGGAGATACTGCTCGGACCAG
CCGACGGAATGGTCTCCAAGGGGTGGAGGTTGCTGGCACCCATCACGGCATACGCCCAGCAGACAAGGGGCCTCCTAGGGTGTATAATCACCA
GCCTAACCGGCCGGGACAAAAACCAGGTGGAGGGTGAGGTCCAGATTGTGTCAACTGCTGCCCAAACCTTCCTGGCAACGTGCATCAATGGAG
TATGCTGGACCGTCTACCACGGGGCCGGGACGAGGACCATCGCATCACCCAAGGGTCCTGTCATCCAGATGTACACCAATGTAGACAAAGATC
TTGTGGGCTGGCCCGCTCCCCAAGGTTCCCGTTCATTGACACCCTGCACCTGCGGCTCCTCGGACCTTTATCTGGTCACGAGGCACGCCGATG
TCATTCCCGTGCGCCGGCGGGGTGATAGCAGGGGCAGCCTGCTTTCGCCCCGGCCCATTTCCTACTTGAAAGGCTCCTCGGGGGGCCCGCTGT
TGTGCCCCGCGGGGCATGCTGTGGGCATATTCAGGGCCGCAGTGTGCACCCGTGGAGTGGCTAAGGCGGTGGACTTTATCCCTGTAGAGAACC
TAGAGACAACCATGAGGTCCCCGGTGTTCACGGACAACTCCTCTCCACCGGCAGTACCCCAGAGCTTCCAGGTGGCCCACCTGCATGCTCCCA
CAGGCAGCGGCAAGAGCACCAAGGTCCCGGCTGCATACGCAGCTCAGGGCTATAAGGTGCTAGTGCTCAACCCTTCTGTTGCTGCAACACTAG
GCTTCGGTGTTTATATGTCCAAGGCCCATGGGATCGATCCTAACATCAGGACCGGGGTGAGAACAATTACCACTGGCAGCCCCATCACGTACT
CCACCTACGGCAAGTTCCTTGCCGACGGCGGGTGCTCAGGGGGTGCTTATGACATAATAATCTGTGACGAGTGCCACTCCACGGATGCCACAT
CTATCTTAGGCATCGGCACCGTCCTTGACCAAGCAGAGACCGCGGGGGCGAGGCTTGTTGTGCTCGCCACCGCTACCCCTCCGGGCTCTGTCA
CCGTGCCCCATCCTAACATCGAGGAGGTTGCTCTGTCCACCACCGGAGAGATCCCTTTTTATGGCAAGGCTATCCCCCTCGAAGTAATCAAGG
GGGGGAGGCATCTCATCTTCTGTCATTCAAAGAAGAAGTGTGACGAGCTCGCCGCAAAGCTGGTCGCATTGGGCGTCAATGCCGTGGCCTATT
ACCGCGGCCTTGACGTGTCTGTCATCCCGACCAGCGGCGATGTTGTCGTCGTGGCAACTGATGCTCTCATGACCGGCTATACCGGCGACTTCG
ACTCGGTGATAGACTGCAACACGTGTGTCACCCAGACAGTTGATTTCAGCCTTGACCCCACCTTCACCATTGAGACAACCACGCTTCCCCAGG
ATGCTGTCTCCCGTACACAACGTCGGGGCAGGACTGGCAGGGGGAAGCCAGGCACCTACAGATTTGTGGCACCGGGGGAGCGCCCCTCCGGCA
TGTTCGACTCGTCTGTCCTCTGTGAGTGCTATGACGCGGGCTGTGCTTGGTATGAGCTCACGCCCGCCGAGACTACAGTTAGGCTACGAGCGT
ACATGAACACCCCGGGGCTTCCCGTGTGCCAGGACCACCTTGAATTTTGGGAGGGCGTCTTTACGGGCCTTACTCATATAGATGCCCACTTCC
TATCCCAGACAAAGCAGAGTGGGGAGAACCTTCCTTACCTGGTAGCGTACCAAGCCACCGTGTGCGCTAGGGCTCAAGCCCCTCCCCCATCGT
GGGACCAGATGTGGAAGTGCTTGGTCCGCCTCAAGCCCACCCTCCATGGGCCAACACCCCTGCTATACAGATTGGGCGCTGTTCAGAATGAAG
TCACCCTGACACACCCAATCACAAAATACATCATGACATGTATGTCGGCTGA
Donor 67539/ Panel Number 10029/ Transmitted Variant #5 (SEQ ID NO: 12)
TCGCCCACAGGACGTCAAGTTCCCGGGTGGCGGTCAGATCGTTGGTGGAGTTTACTTGTTGCCGCGCAGGGGCCCTAGATTGGGTGTGCGCGC
GACGAGGAAGACTTCCGAGCGGTCGCAACCTCGAGGCAGACGTCAGCCTATCCCCAAGGCACGTCGGCCCGAGGGCAGGACCTGGGCTCAGCC
CGGGTACCCCTGGCCCCTCTATGGCAATGAGGGCTGTGGGTGGGCGGGATGGCTCCTGTCTCCCCGTGGCTCTCGGCCTAGCTGGGGCCCCTC
AGACCCCCGGCGTAGGTCGCGTAATTTGGGTAAAGTCATCGATACCCTTACATGCGGCTTCGCCGACCTCATGGGGTACATACCGCTCGTCGG
CGCTCCTCTTGGGGGCGCTGCCAGGGCCCTGGCGCATGGCGTCCGGGTTCTGGAAGACGGCGTGAACTATGCAACAGGGAACCTTCCTGGTTG
CTCTTTCTCTATCTTCCTCCTGGCTTTGCTCTCTTGCCTGACTGTGCCTGCTTCAGCCTACCAAGTGCGCAACTCCACGGGGCTTTATCATGT
CACCAATGATTGCCCTAACTCGAGTATTGTGTACGAGGCGGCCGATGCTATCCTGCACACTCCGGGGTGTGTCCCTTGCGTCTACGAGGGTAA
CGCCTCGAGGTGTTGGGTGGCGATAACCCCCACGGTGGCCACCAGGGATGGCAAACTCCCCACAGTCCAGCTTCGACGTCACATCGATCTGCT
TGTCGGGAGCGCTACCCTTTGTTCGGCCCTTTACGTGGGGGATCTGTGCGGGTCTGTTTTTCTTGTCGGCCAACTGTTCACCTTCTCTCCCAG
GCTCCACTGGACAACGCAGGACTGCAATTGTTCCATCTACCCCGGCCATATAACGGGTCACCGTATGGCATGGGACATGATGATGAACTGGTC
CCCTACGACGGCGCTGGTAGTAGCTCAGATGCTCCGGATCCCGCAAGCCATCTTGGACATGATCGCTGGTGCTCACTGGGGAGTCCTAGCGGG
CATAGCGTATTTCTCCATGGTGGGGAACTGGGCGAAGGTCCTAGTAGTGCTGCTGCTATTTGCCGGCGTCGACGCGGAAACCCACGTCACCGG
GGGAGCTGCCGGCCGTACCATGGCTGGATTTACTGGTCTCTTTACACAAGGCGCCAAGCAGAGCATCCAGTTGGTTAACACCAACGGCAGTTG
GCACATCAACAGAACGGCTTTGAACTGCAACGATAGCCTTCAGACCGGCTGGATAGCGGGGCTTCTCTATCACAACAAATTCAACTCTTCAGG
CTGTCCCGAGAGGTTGGCCAGCTGCCGACCCCTTACCGATTTTGCCCAGGGCTGGGGCCCTATCAGTTACGCCAACGGAAGCGGCCCCGACCA
ACGCCCCTACTGCTGGCACTACCCCCCAAAGCCTTGCGGCATTGTGCCCGCACAGAGCGTATGTGGCCCGGTATATTGTTTCACTCCTAGCCC
CGTGGTGGTGGGAACGACCGACAGGTCGGGCGCGCCTACCTACGGATGGGGTGCAAACGATACGGACGTCTTCGTCCTTAACAACACCAGGCC
ACCACTGGGCAATTGGTTCGGTTGCACCTGGATGAACTCAACTGGATACACCAAAGTGTGCGGGGCGCCCCCCTGTGCCATCAGAGGGGTGGG
CAACAACACCTTGCACTGCCCCACCGATTGTTTCCGCAAGCATCCGGAAGCCACATACTCTCGGTGCGGCTCCGGTCCCTGGATTACACCCAG
GTGCCTGGTCAACTACCCGTATAGGCTTTGGCATTACCCTTGTACCATCAACTACACCGTGTTCAAGGTCAGGATGTACGTGGGAGGGGTCGA
GCATAGGCTAGAGGCTGCCTGCAACTGGACGCGGGGCGAACGTTGCAGTCTGGAAGACAGGGACAGGTCCGAGCTCAGCCCGTTGCTGCTGTC
CACCACACAGTGGCAGGTCCTTCCCTGTTCCTTCACGACCCTGCCAGCCTTGTCCACCGGCCTCATCCACCTCCACCAGAACATTGTGGACGT
GCAGTACTTATACGGGGTGGGGTCAAGTATCGCGTCCTGGGCCATCAAGTGGGAGTACGTCGTTCTCCTATTCCTTCTGCTTGCAGACGCGCG
CGTCTGCTCCTGCTTGTGGATGATGTTACTCATATCCCAAGCGGAGGCGGCCTTGGAGAACCTCGTAGTGCTCAATGCAGCATCTTTGGCCGG
GACGCATGGTCTTGTGTCCTTCCTCGTGTTCTTCTGCTTTGCGTGGTACTTGAAGGGTAGGTGGGTGCCCGGAGCGGCCTACGCCCTCTACGG
GATGTGGCCTCTCCTCCTGCTCCTGTTGGCGTTGCCCCAGCGGGCATACGCGTTGGACACGGAGGTGGCCGCGTCGTGTGGCGGCGCTGTTCT
TGTCGGGTTGATGGCGCTGACTCTGTCACCACATTACAAGCGATATGTCAGCTGGTGCTTGTGGTGGCTTCAGTACTTTCTGACCAGAGCAGA
AGCGCAACTGCACGTGTGGGTTCCCCCCCTCGACGTCCGAGGGGGGCGCGACGCCGTCATCTTACTCATGTGTGCTGTACGCCCGACTTTGGT
GTTTGACATCACCAAGCTGCTGCTGGCCGTCTTCGGGCCCCTTTGGATTCTCCAAGCCAGTTTGCTTAAAGTACCCTACTTTGTGCGCGTTCA
AGGCCTTCTCCGGATCTGCGCGCTAGCGCGGAAGATGGCGGGGGGTCATTACGTGCAAATGGTCATCATCAAACTAGGGGCGCTCACTGGCAC
CTATGTTTATAACCACCTCACTCCTCTTCGGGACTGGGCGCACAACGGCCTGCGAGATCTGGCTGTGGCTGTAGAGCCAGTCGTCTTCTCCCG
AATGGAGACCAACCTCATCACGTGGGGGGCAGACACCGCCGCGTGCGGTGACATCATCAACGGCTTGCCCGTCTCCGCCCGTAGGGGCCGGGA
GATACTGCTCGGACCAGCCGACGGAATGGTCTCCAAGGGGTGGAGGTTGCTGGCACCCATCACGGCATACGCCCAGCAGACAAGGGGCCTCCT
AGGGTGTATAATCACCAGCCTAACCGGCCGGGACAAAAACCAGGTGGAGGGTGAGGTCCAGATTGTGTCAACTGCTGCCCAAACTTTCCTGGC
AACGTGCATCAATGGAGTATGCTGGACCGTCTACCACGGGGCCGGGACGAGGACCATCGCATCACCCAAGGGTCCTGTCATCCAGATGTACAC
CAATGTAGACAAAGATCTTGTGGGCTGGCCCGCTCCCCAAGGTTCCCGTTCATTGACACCCTGCACCTGCGGCTCCTCGGACCTTTATCTGGT
CACGAGGCACGCCGATGTCATTCCCGTGCGCCGGCGGGGTGATAGCAGGGGCAGCCTGCTTTCGCCCCGGCCCATTTCCTACTTGAAAGGCTC
CTCGGGGGGTCCGCTGTTGTGCCCCGCGGGGCATGCTGTGGGCATATTCAGGGCCGCAGTGTGCACCCGTGGAGTGGCTAAGGCGGTGGACTT
TATCCCTGTAGAGAACCTAGAGACAACCATGAGGTCCCCGGTGTTCACGGACAACTCCTCTCCACCGGCAGTACCCCAGAGCTTCCAGGTGGC
CCACCTGCATGCTCCCACAGGCAGCGGCAAGAGCACCAAGGTCCCGGCTGCATACGCAGCTCAGGGCTATAAGGTGCTAGTGCTCAACCCCTC
TGTTGCTGCAACACTGGGCTTCGGTGTTTATATGTCCAAGGCCCATGGGATCGATCCTAACATCAGGACCGGGGTGAGAACAATTACCACTGG
CAGCCCCATCACGTACTCCACCTACGGCAAGTTCCTTGCCGACGGCGGGTGCTCAGGGGGTGCTTATGACATAATAATCTGTGACGAGTGCCA
CTCCACGGATGCCACATCTATCTTAGGCATCGGCACCGTCCTTGACCAAGCAGAGACCGCGGGGGCGAGGCTTGTTGTGCTCGCCACCGCTAC
CCCTCCGGGCTCCGTCACCGTGCCCCATCCTAACATCGAGGAGGTTGCTCTGTCCACCACCGGAGAGATCCCTTTTTATGGCAAGGCTATCCC
CCTCGAAGTAATCAAGGGGGGGAGGCATCTCATCTTCTGTCATTCAAAGAAGAAGTGTGACGAGCTCGCCGCAAAGCTGGTTGCATTGGGCGT
CAATGCCGTGGCCTATTACCGCGGCCTTGACGTGTCTGTCATCCCGACCAGCGGCGATGTTGTCGTCGTGGCAACTGATGCTCTCATGACCGG
CTATACCGGCGACTTCGACTCGGTGATAGACTGCAATACGTGTGTCACCCAGACAGTTGATTTCAGCCTTGACCCCACCTTCACCATTGAGAC
AACCACGCTTCCCCAGGATGCTGTCTCCCGTACACAACGTCGGGGCAGGACTGGCAGGGGGAAGCCAGGCACCTACAGATTTGTGGCACCGGG
GGAGCGCCCCTCCGGCATGTTCGACTCGTCTGTCCTCTGTGAGTGCTATGACGCGGGCTGTGCTTGGTATGAGCTCACGCCCGCCGAGACTAC
AGTTAGGCTACGAGCGTACATGAACACCCCGGGGCTTCCCGTGTGCCAGGACCACCTTGAATTTTGGGAGGGCGTCTTTACGGGCCTTACTCA
TATAGATGCCCACTTCCTATCCCAGACAAAGCAGAGTGGGGAGAACCTTCCTTACCTAGTAGCGTACCAAGCCACCGTGTGCGCTAGGGCTCA
AGCCCCTCCCCCATCGTGGGACCAGATGTGGAAGTGCTTGGTCCGCCTCAAGCCCACCCTCCATGGGCCAACACCCCTGCTATACAGATTGGG
CGCTGTTCAGAATGAAGTCACCCTGACACACCCAATCACAAAATACATCATGACATGTATGTCGGCTGA
Donor 67539/ Panel Number 10029/ Transmitted Variant #6 (SEQ ID NO: 13)
TCGCCCACAGGACGTCAAGTTCCCGGGTGGCGGTCAGATCGTTGGTGGAGTTTACTTGTTGCCGCGCAGGGGCCCTAGATTGGGTGTGCGCGC
GACGAGGAAGACTTCCGAGCGGTCGCAACCTCGAGGCAGACGTCAGCCTATCCCCAAGGCACGTCGGCCCGAGGGCAGGACCTGGGCTCAGCC
CGGGTACCCCTGGCCCCTCTATGGCAATGAGGGCTGTGGGTGGGCGGGATGGCTCCTGTCTCCCCGTGGCTCTCGGCCTAGCTGGGGCCCCTC
AGACCCCCGGCGTAGGTCGCGTAATTTGGGTAAAGTCATCGATACCCTTACATGCGGCTTCGCCGACCTCATGGGGTACATACCGCTCGTCGG
CGCTCCTCTTGGGGGCGCTGCCAGGGCCCTGGCGCATGGCGTCCGGGTTCTGGAAGACGGCGTGAACTATGCAACAGGGAACCTTCCTGGTTG
CTCTTTCTCTATCTTCCTCCTGGCTTTGCTCTCTTGCCTGACTGTGCCTGCTTCAGCCTACCAAGTGCGCAACTCCACGGGGCTTTATCATGT
CACCAATGATTGCCCTAACTCGAGTATTGTGTACGAGGCGGCCGATGCTATCCTGCACACTCCGGGGTGTGTCCCTTGCGTCTACGAGGGTAA
CGCCTCGAGGTGTTGGGTGGCGATAACCCCCACGGTGGCCACCAGGGATGGCAAACTCCCCACAGTCCAGCTTCGACGTCACATCGATCTGCT
TGTCGGGAGCGCTACCCTTTGTTCGGCCCTTTACGTGGGGGACCTGTGCGGGTCTGTCTTTCTTGTCGGCCAACTGTTCACCTTCTCTCCCAG
GCTCCACTGGACAACGCAGGACTGCAATTGTTCCATCTACCCCGGCCATATAACGGGTCACCGTATGGCGTGGGACATGATGATGAACTGGTC
CCCTACGACGGCGCTGGTAGTAGCTCAGATGCTCCGGATCCCGCAAGCCATCTTGGACATGATCGCTGGTGCTCACTGGGGAGTCCTAGCGGG
CATAGCGTATTTCTCCATGGTGGGGAACTGGGCGAAGGTCCTAGTAGTGCTGCTGCTATTTGCCGGCGTCGACGCGGAAACCCACGTCACCGG
GGGAGCTGCCGGCCGTACCATGGCTGGATTTACTGGTCTCTTTACACAAGGCGCCAAGCAGAGCATCCAGTTGGTTAACACCAACGGCAGTTG
GCACATCAACAGAACGGCTTTGAACTGCAACGATAGCCTTCAGACCGGCTGGATAGCGGGGCTTCTCTATCACAACAAATTCAACTCTTCAGG
CTGTCCCGAGAGGTTGGCCAGCTGCCGACCCCTTACCGATTTTGCCCAGGGCTGGGGCCCTATCAGCTACGCCAACGGAAGCGGCCCCGACCA
ACGCCCCTACTGCTGGCACTACCCCCCAAAGCCTTGCGGCATTGTGCCCGCACAGAGCGTATGTGGCCCGGTATATTGTTTCACTCCTAGCCC
CGTGGTGGTGGGAACGACCGACAGGTCGGGCGCGCCTACCTACGGATGGGGTGCAAACGATACGGACGTCTTCGTCCTTAACAACACCAGGCC
ACCACTGGGCAATTGGTTCGGTTGCACCTGGATGAACTCAACTGGATACACCAAAGTGTGCGGGGCGCCCCCCTGTGCCATCAGAGGGGTGGG
CAACAACACCTTGCACTGCCCCACCGATTGTTTCCGCAAGCATCCGGAAGCCACATACTCTCGGTGCGGCTCCGGTCCCTGGATTACACCCAG
GTGCCTGGTCAACTACCCGTATAGGCTTTGGCATTACCCTTGTACCATCAACTACACCGTGTTCAAGGTCAGGATGTACGTGGGAGGGGTCGA
GCACAGGCTAGAGGCTGCCTGCAACTGGACGCGGGGCGAACGTTGCAGTCTGGAAGACAGGGACAGGTCCGAGCTCAGCCCGTTGCTGCTGTC
CACCACACAGTGGCAGGTCCTTCCCTGTTCCTTCACGACCCTGCCAGCCTTGTCCACCGGCCTCATCCACCTCCACCAGAACATTGTGGACGT
GCAGTACTTATACGGGGTGGGGTCAAGTATCGCGTCCTGGGCCATCAAGTGGGAGTACGTCGTTCTCCTATTCCTTCTGCTTGCAGACGCGCG
CGTCTGCTCCTGCTTGTGGATGATGTTACTCATATCCCAAGCGGAGGCGGCCTTGGAGAACCTCGTAGTGCTCAATGCAGCATCTTTGGCCGG
GACGCATGGTCTTGTGTCCTTCCTCGTGTTCTTCTGCTTTGCGTGGTACCTGAAGGGTAGGTGGGTGCCCGGAGCGGCCTACGCCCTCTACGG
GATGTGGCCTCTCCTCCTGCTCCTGTTGGCGTTGCCCCAGCGGGCATACGCGTTGGACACGGAGGTGGCCGCGTCGTGTGGCGGCGCTGTTCT
TGTCGGGTTGATGGCGCTGACTCTGTCACCACATTACAAGCGATATGTCAGCTGGTGCTTGTGGTGGCTTCAGTACTTTCTGACCAGAGCAGA
AGCGCAACTACACGTGTGGGTTCCCCCCCTCGACGTCCGAGGGGGGCGCGACGCCGTCATCTTACTCATGTGTGCTGTACGCCCGACTTTGGT
GTTTGACATCACCAAGCTGCTGCTGGCCGTCTTCGGGCCCCTTTGGATTCTCCAGGCCAGTTTGCTTAAAGTACCCTACTTTGTGCGCGTTCA
AGGCCTTCTCCGGATCTGCGCGCTAGCGCGGAAGATGGCGGGGGGTCATTACGTGCAAATGGTCATCATCAAACTAGGGGCGCTCACTGGCAC
CTATGTTTATAACCACCTCACTCCTCTTCGGGACTGGGCGCACAACGGCCTGCGAGATCTGGCTGTGGCTGTAGAGCCAGTCGTCTTCTCCCG
AATGGAGACCAACCTCATCACGTGGGGGGCAGACACCGCCGCGTGCGGTGACATCATCAACGGCTTGCCCGTCTCCGCCCGTAGGGGCCGGGA
GATACTGCTCGGACCAGCCGACGGAATGGTCTCCAAGGGGTGGAGGTTGCTGGCACCCATCACGGCATACGCCCAGCAGACAAGGGGCCTCCT
AGGGTGTATAATCACCAGCCTAACCGGCCGGGACAAAAACCAGGTGGAGGGTGAGGTCCAGATTGTGTCAACTGCTGCCCAAACTTTCCTGGC
AACGTGCATCAATGGAGTATGCTGGACCGTCTACCACGGGGCCGGGACGAGGACCATCGCATCACCCAAGGGTCCTGTCATCCAGATGTACAC
CAATGTAGACAAAGATCTTGTGGGCTGGCCCGCTCCCCAAGGTTCCCGTTCATTGACACCCTGCACCTGTGGCTCCTCGGACCTTTATCTGGT
CACGAGGCACGCCGATGTCATTCCCGTGCGCCGGCGGGGTGATAGCAGGGGCAGCCTGCTTTCGCCCCGGCCCATTTCCTACTTGAAAGGCTC
CTCGGGGGGTCCGCTGTTGTGCCCCGCGGGGCATGCTGTGGGCATATTCAGGGCCGCAGTGTGCACCCGTGGAGTGGCTAAGGCGGTGGACTT
TATCCCTGTAGAGAACCTAGAGACAACCATGAGGTCCCCGGTGTTCACGGACAACTCCTCTCCACCGGCAGTACCCCAGAGCTTCCAGGTGGC
CCACCTGCATGCTCCCACAGGCAGCGGCAAGAGCACCAAGGTCCCGGCTGCATATGCAGCTCAGGGCTATAAGGTGCTAGTGCTCAACCCCTC
TGTTGCTGCAACACTGGGCTTCGGTGTTTATATGTCCAAGGCCCATGGGATCGATCCTAACATCAGGACCGGGGTGAGAACAATTACCACTGG
CAGCCCCATCACGTACTCCACCTACGGCAAGTTCCTTGCCGACGGCGGGTGCTCAGGGGGTGCTTATGACATAATAATCTGTGACGAGTGCCA
CTCCACGGATGCCACATCTATCTTAGGCATCGGCACCGTCCTTGACCAAGCAGAGACCGCGGGGGCGAGGCTTGTTGTGCTCGCCACCGCTAC
TCCTCCGGGCTCCGTCACCGTGCCCCATCCTAACATCGAGGAGGTTGCTCTGTCCACCACCGGAGAGATCCCTTTTTATGGCAAGGCTATCCC
CCTCGAAGTAATCAAGGGGGGGAGGCATCTCATCTTCTGTCATTCAAAGAAGAAGTGTGACGAGCTCGCCGCAAAGCTGGTTGCATTGGGCGT
CAATGCCGTGGCCTATTACCGCGGCCTTGACGTGTCTGTCATCCCGACCAGCGGCGATGTTGTCGTCGTGGCAACTGATGCTCTCATGACCGG
CTATACCGGCGACTTCGACTCGGTGATAGACTGCAATACGTGTGTCACCCAGACAGTTGATTTCAGCCTTGACCCCACCTTCACCATTGAGAC
AACCACGCTTCCCCAGGATGCTGTCTCCCGTACACAACGTCGGGGCAGGACTGGCAGGGGGAAGCCAGGCACCTACAGATTTGTGGCACCGGG
GGAGCGCCCCTCCGGCATGTTCGACTCGTCTGTCCTCTGTGAGTGCTATGACGCGGGCTGTGCTTGGTATGAGCTCACGCCCGCCGAGACTAC
AGTTAGGCTACGAGCGTACATGAACACCCCGGGGCTTCCCGTGTGCCAGGACCACCTTGAATTTTGGGAGGGCGTCTTTACGGGCCTTACTCA
TATAGATGCCCACTTCCTATCCCAGACAAAGCAGAGTGGGGAGAACCTTCCTTACCTGGTAGCGTACCAAGCCACCGTGTGCGCTAGGGCTCA
AGCCCCTCCCCCATCGTGGGACCAGATGTGGAAGTGCTTGGTCCGCCTCAAGCCCACCCTCCATGGGCCAACACCCCTGCTATACAGATTGGG
CGCTGTTCAGAATGAAGTCACCCTGACACACCCAATCACAAAATACATCATGA
Donor 67539/ Panel Number 10029/ Transmitted Variant #7 (SEQ ID NO: 14)
TCGCCCACAGGACGTCAAGTTCCCGGGTGGCGGTCAGATCGTTGGTGGAGTTTACTTGTTGCCGCGCAGGGGCCCTAGATTGGGTGTGCGCGC
GACGAGGAAGACTTCCGAGCGGTCGCAACCTCGAGGCAGACGTCAGCCTATCCCCAAGGCACGTCGGCCCGAGGGCAGGACCTGGGCTCAGCC
CGGGTACCCCTGGCCCCTCTATGGCAATGAGGGCTGTGGGTGGGCGGGATGGCTCCTGTCTCCCCGTGGCTCTCGGCCTAGCTGGGGCCCCTC
AGACCCCCGGCGTAGGTCGCGTAATTTGGGTAAAGTCATCGATACCCTTACATGCGGCTTCGCCGACCTCATGGGGTACATACCGCTCGTCGG
CGCTCCTCTTGGGGGCGCTGCCAGGGCCCTGGCGCATGGCGTCCGGGTTCTGGAAGACGGCGTGAACTATGCAACAGGGAACCTTCCTGGTTG
CTCTTTCTCTATCTTCCTCCTGGCTTTGCTCTCTTGCCTGACTGTGCCTGCTTCAGCCTACCAAGTGCGCAACTCCACGGGGCTTTATCATGT
CACCAATGATTGCCCTAACTCGAGTATTGTGTACGAGGCGGCCGATGCTATCCTGCACACTCCGGGGTGTGTCCCTTGCGTCTACGAGGGTAA
CGCCTCGAGGTGTTGGGTGGCGATAACCCCCACGGTGGCCACCAGGGATGGCAAACTCCCCACAGTCCAGCTTCGACGTCACATCGATCTGCT
TGTCGGGAGCGCTACCCTTTGTTCGGCCCTTTACGTGGGGGACCTGTGCGGGTCTGTCTTTCTTGTCGGCCAACTATTCACCTTCTCTCCCAG
GCTCCACTGGACAACGCAGGACTGCAATTGTTCCATCTACCCCGGCCATATAACGGGTCACCGTATGGCATGGGACATGATGATGAACTGGTC
CCCTACGACGGCGCTGGTAGTAGCTCAGATGCTCCGGATCCCGCAAGCCATCTTGGACATGATCGCTGGTGCTCACTGGGGAGTCCTAGCGGG
CATAGCGTATTTCTCCATGGTGGGGAACTGGGCGAAGGTCCTAGTAGTGCTGCTGCTATTTGCCGGCGTCGACGCGGAAACCCACGTCACCGG
GGGAGCTGCCGGCCGTACCATGGCTGGATTTACTGGTCTCTTTACACAAGGCGCCAAGCAGAGCATCCAGTTGGTTAACACCAACGGCAGTTG
GCACATCAACAGAACGGCTTTGAACTGCAACGATAGCCTTCAGACCGGCTGGATAGCGGGGCTTCTCTATCACAACAAATTCAACTCTTCAGG
CTGTCCCGAGAGGTTGGCCAGCTGCCGACCCCTTACCGATTTTGCCCAGGGCTGGGGCCCTATCAGTTACGCCAACGGAAGCGGGCCCGACCA
ACGCCCCTACTGCTGGCACTACCCCCCAAAGCCTTGCGGCATTGTGCCCGCACAGAGCGTATGTGGCCCGGTATATTGTTTCACTCCTAGCCC
CGTGGTGGTGGGAACGACCGACAGGTCGGGCGCGCCTACCTACGGATGGGGTGCAAACGATACGGACGTCTTCGTCCTTAACAACACCAGGCC
ACCACTGGGCAATTGGTTCGGTTGCACCTGGATGAACTCAACTGGATACACCAAAGTGTGCGGGGCGCCCCCCTGTGTCATCAGAGGGGTGGG
CAATAACACCTTGCACTGCCCCACCGATTGTTTCCGCAAGCATCCGGAAACCACATACTCTCGGTGCGGCTCCGGTCCCTGGATTACACCCAG
GTGCCTGGTCAACTACCCGTATAGGCTTTGGCATTACCCTTGTACCATCAACTACACCGTGTTCAAGGTCAGGATGTACGTGGGAGGGGTCGA
GCATAGGCTAGAGGCTGCCTGCAACTGGACGCGGGGCGAACGTTGCAGTCTGGAAGACAGGGACAGGTCCGAGCTCAGCCCGTTGCTGCTGTC
CACCACACAGTGGCAGGTCCTTCCCTGTTCCTTCACGACCCTGCCAGCCTTGTCCACCGGCCTCATCCACCTCCACCAGAACATTGTGGACGT
GCAGTACTTATACGGGGTGGGGTCAAGTATCGCGTCCTGGGCCATCAAGTGGGAGTACGTCGTTCTCCTATTCCTTCTGCTTGCAGACGCGCG
CGTCTGCTCCTGCTTGTGGATGATGTTACTCATATCCCAAGCGGAGGCGGCCTTGGAGAACCTCGTAGTGCTCAATGCAGCATCTTTGGCCGG
GACGCATGGTCTTGTGTCCTTCCTCGTGTTCTTCTGCTTTGCGTGGTACCTGAAGGGTAGGTGGGTGCCCGGAGCGACCTACGCCCTCTACGG
GATGTGGCCTCTCCTCCTGCTCCTGTTGGCGTTGCCCCAGCGGGCATACGCGTTGGACACGGAGGTGGCCGCGTCGTGTGGCGGCGCTGTTCT
TGTCGGGTTGATGGCGCTGACTCTGTCACCACATTACAAGCGATATGTCAGCTGGTGCTTGTGGTGGCTTCAGTACTTTCTGACCAGAGCAGA
AGCGCAACTGCACGTGTGGGTTCCCCCCCTCGACGTCCGAGGGGGGCGCGACGCCGTCATCTTACTCATGTGTGCTGTACGCCCGACTTTGGT
GTTTGACATCACCAAGCTGCTGCTGGCCGTCTTCGGGCCCCTTTGGATTCTCCAAGCCAGTTTGCTTAAAGTACCCTACTTTGTGCGCGTTCA
AGGCCTTCTCCGGATCTGCGCGCTAGCGCGGAAGATGGCGGGGGGTCATTACGTGCAAATGGTCATCATCAAACTAGGGGCGCTCACTGGCAC
CTATGTTTATAACCACCTCACTCCTCTTCGGGACTGGGCGCACAACGGCCTGCGAGATCTGGCTGTGGCTGTAGAGCCAGTCGTCTTCTCCCG
AATGGAGACCAACCTCATCACGTGGGGGGCAGACACCGCCGCGTGCGGTGACATCATCAACGGCTTGCCCGTCTCCGCCCGTAGGGGCCGGGA
GATACTGCTCGGACCAGCCGACGGAATGGTCTCCAAGGGGTGGAGGTTGCTGGCACCCATCACGGCATACGCCCAGCAGACAAGGGGCCTCCT
AGGGTGTATAATCACCAGCCTAACCGGCCGGGACAAAAACCAGGTGGAGGGTGAGGTCCAGATTGTGTCAACTGCTGCCCAAACTTTCCTGGC
AACGTGCATCAACGGAGTATGCTGGACCGTCTACCACGGGGCCGGGACGAGGACCATCGCATCACCCAAGGGTCCTGTCATCCAGATGTACAC
CAATGTAGACAAAGATCTTGTGGGCTGGCCCGCTCCCCAAGGCTCCCGTTCATTGACACCCTGCACCTGCGGCTCCTCGGACCTTTATCTGGT
CACGAGGCACGCCGATGTCATTCCCGTGCGCCGGCGGGGTGATAGCAGGGGCAGCCTGCTTTCGCCCCGGCCTATTTCCTACTTGAAAGGCTC
CTCGGGGGGTCCGCTGTTGTGCCCCGCGGGGCATGCTGTGGGCATATTCAGGGCCGCAGTGTGCACCCGTGGAGTGGCTAAGGCGGTGGACTT
TATCCCTGTAGAGAACCTAGAGACAACCATGAGGTCCCCGGTGTTCACGGACAACTCCTCTCCACCGGCAGTACCCCAGAGCTTCCAGGTGGC
CCACCTGCATGCTCCCACAGGCAGCGGCAAGAGCACCAAGGTCCCGGCTGCATACGCAGCTCAGGGCTATAAGGTGCTAGTGCTCAACCCCTC
TGTTGCTGCAACACTGGGCTTCGGTGTTTATATGTCCAAGGCCCATGGGATCGATCCTAACATCAGGACCGGGGTGAGAACAATTACCACTGG
CAGCCCCATCACGTACTCCACCTACGGCAAGTTCCTTGCCGACGGCGGGTGCTCAGGGGGTGCTTATGACATAATAATCTGTGACGAGTGCCA
CTCCACGGATGCCACATCTATCTTAGGCATCGGCACCGTCCTTGACCAAGCAGAGACCGCGGGGGCGAGGCTTGTTGTGCTCGCCACCGCTAC
CCCTCCGGGCTCCGTCACCGTGCCCCATCCTAACATCGAGGAGGTTGCTCTGTCCACCACCGGAGAGATCCCTTTTTATGGCAAGGCTATCCC
CCTCGAAGTAATCAAGGGGGGGAGGCATCTCATCTTCTGTCATTCAAAGAAGAAGTGTGACGAGCTCGCCGCAAAGCTGGTTGCATTGGGCGT
CAATGCCGTGGCCTATTACCGCGGCCTTGACGTGTCTGTCATCCCGACCAGCGGCGATGTTGTCGTCGTGGCAACTGATGCTCTCATGACCGG
CTATACCGGCGACTTCGACTCGGTGATAGACTGCAATACGTGTGTCACCCAGACAGTTGATTTCAGCCTTGACCCCACCTTCACCATTGAGAC
AACCACGCTTCCCCAGGATGCTGTCTCCCGTACACAACGTCGGGGCAGGACTGGCAGGGGGAAGCCAGGCACCTACAGATTTGTGGCACCGGG
GGAGCGCCCCTCCGGCATGTTCGACTCGTCTGTCCTCTGTGAGTGCTATGACGCGGGCTGTGCTTGGTATGAGCTCACGCCCGCCGAGACTAC
AGTTAGGCTACGAGCGTACATGAACACCCCGGGGCTTCCCGTGTGCCAGGACCACCTTGAATTTTGGGAGGGCGTCTTTACGGGCCTTACTCA
TATAGATGCCCACTTCCTATCCCAGACAAAGCAGAGTGGGGAGAACCTTCCTTACCTGGTAGCGTACCAAGCCACCGTGTGCGCTAGGGCTCA
AGCCCCTCCCCCATCGTGGGACCAGATGTGGAAGTGCTTGGTCCGCCTCAAGCCCACCCTCCATGGGCCAACACCCCTGCTATACAGATTGGG
CGCTGTTCAGAATGAAGTCACCCTGACACACCCAATCACAAAATACATCATGACATGTATGTCGGCTGA
Donor 67539/ Panel Number 10029/ Transmitted Variant #8 (SEQ ID NO: 15)
TCGCCCACAGGACGTCAAGTTCCCGGGTGGCGGTCAGATCGTTGGTGGAGTTTACTTGTTGCCGCGCAGGGGCCCTAGATTGGGTGTGCGCGC
GACGAGGAAGACTTCCGAGCGGTCGCAACCTCGAGGCAGACGTCAGCCTATCCCCAAGGCACGTCGGCCCGAGGGTAGGACCTGGGCTCAGCC
CGGGTACCCCTGGCCCCTCTATGGCAATGAGGGCTGTGGGTGGGCGGGATGGCTCCTGTCTCCCCGTGGCTCTCGGCCTAGCTGGGGCCCCTC
AGACCCCCGGCGTAGGTCGCGTAATTTGGGTAAAGTCATCGATACCCTTACATGCGGCTTCGCCGACCTCATGGGGTACATACCGCTCGTCGG
CGCCCCTCTTGGGGGCGCTGCCAGGGCCCTGGCGCATGGCGTCCGGGTTCTGGAAGACGGCGTGAACTATGCAACAGGGAACCTTCCTGGTTG
CTCTTTCTCTATCTTCCTCCTGGCTTTGCTCTCTTGCCTGACTGTGCCTGCTTCAGCCTACCAAGTGCGCAACTCCACGGGGCTTTATCATGT
CACCAATGATTGCCCTAACTCGAGTATTGTGTACGAGGCGGCCGATGCTATCCTGCACACTCCGGGGTGTGTCCCTTGCGTCTACGAGGGTAA
CGCCTCGAGGTGTTGGGTGGCGATAACCCCCACGGTGGCCACCAGGGACGGCAAACTCCCCACAGTGCAGCTTCGACGTCACATCGATCTGCT
TGTCGGGAGCGCTACCCTTTGTTCGGCCCTTTACGTGGGGGACCTGTGCGGGTCTGTCTTTCTTGTCGGCCAACTGTTCACCTTCTCTCCCAG
GCTCCACTGGACAACGCAGGACTGTAATTGTTCCATCTACCCCGGCCATATAACGGGTCACCGTATGGCATGGGACATGATGATGAACTGGTC
CCCTACGACGGCGCTGGTAGTAGCTCAGATGCTCCGGATCCCGCAAGCCATCTTGGACATGATCGCTGGTGCTCACTGGGGAGTCCTAGCGGG
CATAGCGTATTTCTCCATGGTGGGGAACTGGGCGAAGGTCCTAGTAGTGCTGCTGCTATTTGCCGGCGTCGACGCGGGGACCCACGTCACCGG
GGGAGCTGCCGGCCGTACCACGGCTGGATTTGCTGGTCTCTTTACACGAGGCGCCCAGCAGAGCATCCAGTTGGTTAACACCAACGGCAGTTG
GCACATCAACAGAACGGCTTTGAACTGCAACGATAGCCTTCAGACCGGCTGGATAGCGGGGCTTCTCTATCACAACAAATTCAACTCTTCAGG
CTGTCCCGAGAGGTTGGCCAGCTGCCGACCCCTTACCGATTTTGCCCAGGGCTGGGGCCCTATCAGTTACGCCAACGGAAGCGGCCCCGACCA
ACGCCCCTACTGCTGGCACTACCCCCCAAAGCCTTGCGGCATTGTGCCCGCACAGAGCGTATGTGGCCCGGTATATTGTTTCACCCCTAGCCC
CGTGGTGGTGGGAACGACCGACAGGTCGGGCGCGCCTACCTACGGATGGGGTGCAAACGATACGGACGTCTTCGTCCTCAACAACACCAGGCC
ACCACTGGGCAATTGGTTCGGTTGCACCTGGATGAACTCAACTGGATATACCAAAGTGTGCGGGGCGCCCCCCTGTTTCATCAGAGGGGTGGG
CAACAACACCTTGCACTGCCCCACCGATTGCTTCCGCAAGCATCCGGAAGCCACATACTCTCGGTGCGGCTCCGGTCCCTGGATTACACCCAG
GTGCCTGGTCAACTACCCGTATAGGCTTTGGCATTACCCTTGTACCATCAACTACACCGTGTTCAAGGTCAGGATGTACGTGGGAGGGGTTGA
GCATAGGCTAGAGGCTGCCTGCAACTGGACGCGGGGCGAACGTTGCAGTCTGGAAGACAGGGACAGGTCCGAGCTCAGCCCGTTGCTGCTGTC
CACCACACAGTGGCAGGTCCTTCCCTGTTCCTTCACGACCCTGCCAGCCTTGTCCACTGGCCTCATCCACCTCCACCAGAACATTGTGGACGT
GCAGTACTTATACGGGGTGGGGTCAAGTATCGCGTCCTGGGCCATCAAGTGGGAGTACGTCGTTCTCCTATTCCTTCTGCTTGCAGACGCGCG
CGTCTGCTCCTGCTTGTGGATGATGTTGCTCATATCCCAAGCGGAGGCGGCCTTGGAGAACCTCGTAGTGCTCAATGCAGCATCTTTGGCCGG
GACGCATGGGTTTGTGTCCTTCCTCGTGTTCTTCTGCTTTGCGTGGTACCTGAAGGGTAGGTGGGTGCCCGGAGCAGCCTACGCCCTCTACGG
GATGTGGCCTCTCCTCCTGCTCCTGTTGGCGTTGCCCCAGCGGGCATACGCGTTGGACACGGAGGTGGCCGCGTCGTGTGGCGGCGCTGTTCT
TGTCGGGTTGATGGCGCTGACTCTGTCACCACATTACAAGCGATATGTCAGCTGGTGCTTGTGGTGGCTTCAGTACTTTCTGACCAGAGCAGA
AGCGCAACTGCACGTGTGGGTTCCCCCCCTCGACGTCCGAGGGGGGCGCGACGCCGTCATCTTACTCATGTGTGCTGTACGCCCGACTTTGGT
GTTTGACATCACCAAGCTGCTGCTGGCCGTCTTCGGGCCCCTTTGGATTCTCCAAGCCAGTTTGCTCAAAGTACCCTACTTTGTGCGCGTTCA
AGGCCTTCTCCGGATCTGCGCGCTAGCGCGGAAGATGGCGGGGGGTCATTACGTGCAAATGGTCATCATCAAGCTAGGGGCGCTCACTGGCAC
CTATGTTTATAACCACCTCACTCCTCTTCGGGACTGGGCGCACAACGGCCTGCGAGATCTGGCTGTGGCTGTAGAGCCAGTCGTCTTCTCCCG
AATGGAGACCAACCTCATCACGTGGGGGGCAGACACCGCCGCGTGCGGTGACATCATCAACGGCTTGCCCGTCTCCGCCCGTAGGGGCCGGGA
GATACTGCTCGGACCAGCCGACGGAATGGTCTCCAAGGGGTGGAGGTTGCTGGCACCCATCACGGCATATGCCCAGCAGACGAGGGGCCTCCT
AGGGTGTATAATCACCAGCCTAACCGGCCGGGACAAAAACCAGGTGGAGGGTGAGGTCCAGATTGTGTCAACTGCTGCCCAAACTTTCCTGGC
AACGTGCATCAATGGAGTATGCTGGACCGTCTACCACGGGGCCGGGACGAGGACCATCGCATCACCCAAGGGTCCTGTCATCCAGATGTACAC
CAATGTAGACAAAGATCTTGTGGGCTGGCCCGCTCCCCAAGGTTCCCGTTCATTGACACCCTGCACCTGCGGCTCCTCGGACCTTTATCTGGT
CACGAGGCACGCCGATGTCATTCCCGTGCGCCGGCGGGGTGATAGCAGGGGCAGCCTGCTTTCGCCCCGGCCCATTTCCTACTTGAAAGGCTC
CTCGGGGGGTCCGCTGTTGTGCCCCGCGGGGCATGCTGTGGGCATATTCAGGGCCGCAGTGTGCACCCGTGGAGTGGCTAAGGCGGTGGACTT
TATCCCTGTAGAGAACCTAGAGACAACCATGAGGTCCCCGGTGTTCACGGACAACTCCTCTCCACCGGCAGTACCCCAGAGCTTCCAGGTGGC
CCACCTGCATGCTCCCACAGGCAGCGGCAAGAGCACCAAGGTCCCGGCTGCATACGCAGCTCAGGGCTATAAGGTGCTAGTGCTCAACCCCTC
TGTTGCTGCAACACTAGGCTTCGGTGTTTATATGTCCAAGGCCCATGGGATCGATCCTAACATCAGGACCGGGGTGAGAACAATTACCACTGG
CAGCCCCATCACGTACTCCACCTACGGCAAGTTCCTTGCCGACGGCGGGTGCTCAGGGGGTGCTTATGACATAATAATCTGTGACGAGTGCCA
CTCCACGGATGCCACATCTATCTTAGGCATCGGCACCGTCCTTGACCAAGCAGAGACCGCGGGGGCGAGGCTTGTTGTGCTCGCCACCGCTAC
CCCTCCGGGCTCCGTCACCGTGCCCCATCCTAACATCGAGGAGGTTGCTCTGTCCACCACCGGAGAGATCCCTTTTTATGGCAAGGCTATCCC
CCTCGAAGTAATCAAGGGGGGGAGGCATCTCATCTTCTGTCATTCAAAGAAGAAGTGTGACGAGCTCGCCGCAAAGCTGGTTGCATTGGGCGT
CAATGCCGTGGCCTATTACCGCGGCCTTGACGTGTCTGTCATCCCGACCAGCGGCGATGTTGTCGTCGTGGCAACTGATGCTCTCATGACCGG
CTATACCGGCGACTTCGACTCGGTGATAGACTGCAACACGTGTGTCACCCAGACAGTTGATTTCAGCCTTGACCCCACCTTCACCATTGAGAC
AACCACGCTTCCCCAGGATGCTGTCTCCCGTACACAACGTCGGGGCAGGACTGGCAGAGGGAAGCCAGGCACCTACAGATTTGTGGCACCGGG
GGAGCGCCCCTCCGGCATGTTCGACTCGTCTGTCCTCTGTGAGTGCTATGACGCGGGCTGTGCTTGGTATGAGCTCACGCCCGCCGAGACTAC
AGTTAGGCTACGAGCGTACATGAACACCCCGGGACTTCCCGTGTGCCAGGACCACCTTGAATTTTGGGAGGGCGTCTTTACGGGCCTTACTCA
TATAGATGCCCACTTCCTATCCCAGACAAAGCAGAGCGGGGAGAACCTTCCTTACCTGGTAGCGTACCAAGCCACCGTGTGCGCTAGGGCTCA
AGCCCCTCCCCCATCGTGGGACCAGATGTGGAAGTGCTTGGTCCGCCTCAAGCCCACCCTCCATGGACCAACACCCCTGCTATACAGATTGGG
CGCTGTTCAGAATGAGATCACCCTGACACACCCAATCACAAAATACATCATGACATGTATGTCGGCTGA
Donor 68744/Panel Number 10020/ Transmitted Variant #1 (SEQ ID NO: 16)
TCGCCCACAGGACGTCAAGTTCCCGGGCGGCGGCCAGATCGTTGGTGGAGTTTACTTGTTGCCGCGCAGGGGCCCTAGATTGGGTGTGCGCGC
GACGAGGAAGACTTCCGAGCGGTCGCAACCTCGAGGTAGACGTCAGCCTATCCCCAAGGCGCGTCGGTCCGAGGGCAGGACCTGGGCTCAGCC
CGGGTACCCTTGGCCCCTCTATGGCAATGAGGGTTGCGGATGGGCGGGATGGCTCCTGTCCCCCCGTGGCTCTCGGCCTAGCTGGGGCCCCAC
AGACCCCCGGCGTAGGTCGCGCAATTTGGGCAAGGTCATCGATACCCTCACGTGCGGCTTCGCCGACCTCATGGGGTACATACCGCTCGTCGG
CGCCCCTCTTGGGGGCGCTGCCAGGGCCCTGGCGCATGGAGTCCGGGTTCTGGAAGACGGCGTGAATTATGCAACAGGGAACCTCCCCGGTTG
CTCTTTCTCTATCTTCCTTCTGGCCTTGCTCTCTTGCCTGACTGTGCCCGCTTCAGCCTACCAAGTGCGCAACTCCACGGGGCTTTACCATGT
CACCAATGATTGCCCTAATTCGAGTATTGTGTACGAGGCGGCCGATGCTATCCTGCACACCCCGGGGTGTGTCCCTTGCGTTCGTAAGGGTAA
CACCTCGGTGTGTTGGGTGGCGGTAACCCCTACGGTGGCCACCAGGGACGGCAAACTCCCCACAACGCAGCTTCGACGTCATATCGATCTGCT
CGTCGGGAGTGCCACCCTCTGTTCGGCCCTCTATGTGGGGGACCTGTGCGGGTCTGTCTTTCTTGTTGGCCAACTGTTTACCCTCTCTCCCAG
ACGCCACTGGACAACGCAAGGCTGCAATTGTTCCATCTATCCCGGCCATATAACGGGCCACCGCATGGCATGGGATATGATGATGAACTGGTC
CCCTACAACGGCGTTGGTAATGGCACAGCTGCTCCGGATCCCACAAGCCATCATGGACATGATCGCTGGTGCTCACTGGGGAGTCCTGGCGGG
CATAGCGTATTTCTCTATGGTGGGGAACTGGGCGAAGGTCCTGGTAGTGCTGCTGCTATTTGCCGGCGTCGACGCAAAAACTTATGTCACCGG
GGGAGCTGCTGCCCACACCACGTCCGGACTTGCTGGGCTCTTCTTACAAGGCCCCAAGCAGAACGTCCACTTGATCAACACCAACGGCAGTTG
GCACATCAATAGTACGGCCTTGAACTGCAACGCTAGCCTTGACACCGGCTGGATAGCAGGGCTTTTCTATTACAACAAATTCAACTCTTCAGG
TTGTCCCGAGAGGTTGGCCAGCTGCCGACTCCTTACTGATTTTGACCAGGGCTGGGGCCCTATCAGTCATGCCAACGGAAGCGGCCCCGACCA
ACGCCCCTACTGCTGGCACTACCCCCCAAAACCTTGCGGCATTGTGCCCGCGAAGAGTGTGTGTGGCCCGGTATATTGCTTCACTCCCAGCCC
TGTGGTGGTGGGAACGACCGACAGGTCGGGCGAACCTACCTACAACTGGGGTGAAAATGATACGGACGTCTTCGTCCTTAACAACATCAGGCC
ACCGCTGGGTAATTGGTTTGGTTGTACCTGGATGAACTCAACCGGATTCACCAAAGTGTGCGGGGCGCCTCCTTGTGACATCGGGGGGGCGGG
CAACAACACCTTGCACTGCCCCACTGATTGTTTCCGCAAGCATCCGGAAGCCACGTACTCTCGGTGCGGCTCCGGTCCCTGGATCACGCCCAG
GTGCCTGGTCCACTACCCATACAGGCTTTGGCATTATCCCTGTACCATCAACTACACCATATTTAAAGTCAGGATGTACGTGGGAGGGATCGA
GCACAGGTTGGAAGCTGCCTGCAACTGGACGCGGGGCGAGCGTTGCGATCTGGAAGACAGGGACAGGTCCGAGCTTAGCCCGTTGCTGCTGTC
TACCACACAGTGGCAAGTCCTTCCGTGTTCCTTCACGGCCATGCCAGCCTTGTCCACCGGCCTCATCCACCTCCACCAGAACATTGTGGATGT
GCAGTATTTGTACGGGGTGGGGTCAAGCATTGCGTCCTGGGCCATTAAGTGGGAGTACGTCGTTCTCCTGTTCCTTTTGCTTGCAGACGCGCG
CGTCTGCTCCTGCTTGTGGATGATGTTACTCATATCCCAAGCGGAGGCGGCTTTGGAGAACCTTGTAATACTCAATGCAGCATCCCTGGCCGG
GACGCACGGTCTTGTATCCTTCCTCGTGTTCTTCTGCTTTGCATGGTATCTGAAAGGCAGGTGGGTGCCCGGAGCGGCTTACGCCTTCTACGG
GATGTGGCCTCTCCTCCTGCTCCTGCTGGCGTTGCCCCAGCGGGCATACGCGCTGGACACGGAGGTGGCCGCGTCGTGTGGCGGCGTTGTCCT
TGTCGGGTTAATGGCGCTGACTTTATCACCACACTACAAGCGCTATATCAGCTGGTGCTTATGGTGGCTTCAGTATTTTCTGACCAGAGCGGA
AGCGCAGCTGCACGTGTGGGTTCCCCCCCTCAACGTCCGGGGGGGGCGTGACGCTGTCATCTTACTCATGTGTGTTGTACACCCGACTCTGGT
ATTCGACATCACCAAAATGCTGCTGGCCGTCTATGGACCCCTCTGGATTCTTCAAGCCAGTTTGCTTGAGGTACCCTACTTTGTGCGCGTCCA
AGGCCTTCTCCGGATCTGCGCGCTAGCGCGGAAGATGGTCGGAGGCCATTACGTGCAAATGGCCATCATCAAGTTAGGGGCGCTTACTGGCAC
CTATATTTATAATCATCTCACCCCTCTTCAGGACTGGGCGCACAACGGCCTGCGAGACCTGGCCGCGGCTGTAGAGCCAGTCGTTTTCTCCCA
AATGGAGACCAAGCTCATCACGTGGGGGGCAGACACTGCCGCGTGCGGTGACATTGTCGACGGCTTACCCGTCTCCGCCCGTAGGGGCCGGGA
GATACTGCTTGGGCCGGCCGATGGAATGGTCTCCAAGGGGTGGAGGTTGCTGGCGCCCATCACGGCGTACGCCCAGCAGACAAGGGGCCTCCT
AGGGTGTATAATCACCAGCCTAACTGGCCGGGACAAAAACCAAGTGGAAGGTGAGGTCCAGATTGTGTCGACTGCTGCCCAAACTTTCCTGGC
AACGTGCATCAATGGGGTATGCTGGACTGTCTACCACGGGGCCGGAACGAGGACCATCGCATCACCCAAGGGTCCTGTTATCCAGATGTATAC
CAATGTAGACCAAGACCTTGTGGGCTGGCCCGCTCCTCAAGGTGCCCGCTCATTGACACCCTGCACCTGCGGCTCCTCGGACCTTTACTTGGT
CACGAGGCACGCCGATGTCATTCCCGTGCGCCGGCGGGGTGATAGCAGGGGCAGCCTGCTCTCGCCCCGGCCTATTTCCTACTTGAAAGGCTC
CTCGGGAGGTCCGCTGTTGTGCCCCGCGGGACACGCCGTGGGCATATTTAGGGCCGCGGTGTGTACCCGTGGAGTGGCTAAGGCGGTGGACTT
TATCCCCGTGGAGAGCCTGGAAACAACCATGAGGTCCCCGGTGTTTACGGACAACTCCTCCCCACCAGCGGTGCCCCAGACCTTCCAGGTGGC
CCATTTGCATGCTCCCACAGGCAGCGGCAAGAGCACCAAAGTCCCGGCTGCATATGCAGCTCAGGGTTATAAGGTGCTAGTGCTCAACCCCTC
TGTCGCTGCAACATTGGGCTTTGGTGCCTACATGTCTAAGGCCCATGGGATCGATCCTAACATCAGGACCGGGGTGAGGACAATTACCACTGG
CAGCCCCATCACGTACTCCACCTACGGTAAGTTCCTTGCCGACGGCGGGTGCTCAGGGGGCGCTTATGACATAATAATCTGTGACGAGTGCCA
TTCCACGGATGCCACATCCATCTTGGGCATCGGCACTGTCCTTGACCAAGCAGAGACCGCGGGGGCGAGACTGGTTGTGCTCGCCACCGCTAC
CCCTCCGGGCTCTATCACTGTGCCACATCCCAACATCGAGGAGGTTGCTCTGTCCACCACCGGAGAGATCCCTTTTTACGGCAAGGCCATCCC
CCTTGATGTAATCAAGGGGGGGAGACATCTCATTTTCTGTCACTCAAAGAAGAAGTGTGACGAGCTTGCCGCAAAGCTGGTCGCATTGGGCGT
CAATGCCGTGGCCTACTACCGCGGTCTCGACGTATCTGTCATCCCGACCGGCGGCGATGTTGTCGTCGTGGCAACTGATGCTCTCATGACCGG
CTTTACTGGCGACTTCGACTCGGTGATAGACTGCAACACGTGCGTCACCCAGACAGTCGATTTCAGCCTTGACCCTACCTTCACCATTGAGAC
AACCACGCTTCCCCAGGATGCTGTCTCCCGCACTCAACGTCGGGGCAGGACTGGCAGGGGGAGGCAAGGCACCTACAGATTTGTGGCACCGGG
GGAGCGCCCCTCTGGCATGTTCGACTCGTCTGTCCTCTGTGAGTGCTATGACGCGGGCTGTGCTTGGTACGAGCTCACGCCTGCCGAGACCAC
AGTTAGGCTACGAGCGTATATGAACACCCCGGGGCTTCCCGTGTGTCAAGACCATCTTGAATTTTGGGAGGGCGTCTTTACAGGCCTCACCCA
TATAGATGCCCACTTCCTATCCCAGACAAAACAGAGCGGGGAGAATCTTCCTTACCTGGTAGCGTACCAAGCCACCGTGTGCGCTAGGGCGCA
AGCCCCCCCCCCATCGTGGGACCAGATGTGGAAGTGTTTGGTCCGCCTCAAACCCACCCTCCACGGGCCAACACCCCTGCTATACAGACTGGG
TGCTGTTCAAAATGAAGTCACCCTGACGCACCCAGTCACCAAATACATCATGACATGTATGTCGGCTGA
Donor 65064/ Panel Number 10017/ Transmitted Variant #1 (SEQ ID NO: 17)
ACCAACCGTCGCCCACAGGACGTCAAGTTCCCGGGTGGCGGTCAGATCGTTGGTGGAGTTTACTTGTTGCCGCGCAGGGGCCCTAGATTGGGT
GTGCGCGCGACGAGGAAGACTTCCGAGCGGTCGCAACCTCGTGGTAGACGTCAGCCTATCCCCAAGGCACGTCGGCCCGAGGGCAGGACCTGG
GCTCAGCCCGGGTACCCCTGGCCCCTCTATGGCAATGAGGGCTGCGGGTGGGCGGGATGGCTCCTGTCTCCCCGCGGCTCTCGGCCTAGTTGG
GGCCCCACGGACCCCCGGCGTAGGTCGCGCAATTTGGGTAAGGTCATCGATACCCTCACATGCGGCTTCGCCGACCTCATGGGGTACATACCG
CTCGTCGGCGCCCCTCTTGGAGGCGCTGCCAGGGCCCTGGCGCATGGCGTCCGGGTTCTGGAAGACGGCGTGAACTATGCAACAGGGAATCTT
CCTGGTTGCTCTTTCTCTATCTTCCTTCTGGCTCTGCTCTCTTGCCTGACTGTGCCCGCTTCAGCCTACCAAGTGCGCAACTCTACGGGGCTT
TACCATGTCACCAATGATTGCCCTAACTCGAGCATTGTGTACGAGGCGGCCGATGCCATCCTGCACACTCCGGGGTGTGTCCCTTGCGTCCGC
GAGGGTAACTCCTCGAGGTGTTGGGTGGCGGTGACCCCCACGGTAGCCACTAAGGACGGCAAGCTCCCCACAAGGCAGCTTCGACGTCACATC
GATCTGCTTGTCGGGAGCGCCACCCTCTGCTCGGCCCTCTACGTGGGGGACCTGTGCGGGTCCGTCTTTCTTGTCGGTCAGCTGTTCACCTTC
TCTCCCAGGCGCCACTGGACGACGCAAGACTGCAATTGTTCTATCTATCCCGGCCATATAACGGGTCACCGCATGGCGTGGGATATGATGATG
AACTGGTCCCCTACGGCGGCATTGGTAGTAGCTCAGCTGCTCCGGATCCCACAAGCCATCTTGGACATGATCGCCGGTGCTCACTGGGGAGTC
CTGGCGGGCATGGCGTATTTCTCCATGGTGGGGAACTGGGCGAAGGTCTTGGTAGTGCTGCTGCTATTTGCCGGCGTCGACGCGCAAACCCGC
GTCACCGGGGGAAGTGTCGCCTACACCACGGCTGGTATTGCTAGGTTTTTCCAACCAGGCGCCAAGCAGAACATCCAGCTGATCAACACCAAC
GGCAGTTGGCACATCAATAGCACGGCCTTGAACTGCAATGCAAGCCTTGAAACCGGCTGGTTAGCAGGACTTTTCTATCACAACAGATTCAAC
TCTTCAGGCTGTCCTGAGAGGTTGGCCAGCTGCCGAAGCCTTGCCGACTTTGACCAGGGCTGGGGCCCCATCAGCCATGCCAATGGAAGCGGC
CCCGACCACCGCCCCTACTGCTGGCACTACCCCCCAAAACCTTGTGGTATTGTGCCCGCAAAGAACGTGTGTGGCCCGGTATATTGCTTCACC
CCCAGCCCCGTGGTGGTGGGAACGACCGACAGGGCGGGTGCGCCTACCTACAACTGGGGCGCAAATGAAACGGACGTCTTCGTCCTTAACAAC
ACCAGGCCACCGCAGGGCAATTGGTTCGGTTGTACCTGGATGAACTCAACCGGGTTCACCAAAGTGTGCGGAGCGCCCCCTTGTGCCATCGGA
GGGGTGGGCAACAACACCTTGCACTGCCCCACTGATTGTTTCCGCAAGCATCCGGAAGCCACGTACTCTCGGTGCGGTTCTGGTCCCTGGATC
ACACCCAGGTGCATGGTCCACTACCCGTATAGGCTCTGGCATTATCCCTGTACCATCAACTACACTTTATTTAAAGTCAGGATGTACGTGGGT
GGGGTCGAGCACAGGCTGGAAGCTGCCTGCAACTGGACGCGGGGCGAACGTTGTGATCTGGAAGACAGGGACAGGTCTGAGCTTAGCCCGTTG
CTGCTGTCCACCACACAGTGGCAGGTCCTCCCATGTTCCTTTACGACCCTGCCAGCCTTGTCCACCGGCCTCATCCACCTCCACCAGAACATT
GTGGACGTGCAGTATTTGTACGGGGTGGGGTCAAGCATCGCGTCCTGGGCCATTAAATGGGAGTACGTCGTCCTCCTGTTCCTTCTGCTCGCA
GACGCACGCGTCTGCTCTTGCTTGTGGATGATGTTACTCATATCCCAAGCGGAGGCGGCTTTGGAGAACCTCGTGGTACTCAATGCAGCATCC
CTGGCCGGGACGCACGGTCTTGTACCCTTCCTCGTGTTCTTCTGCTTTGCGTGGTACCTGAAGGGTAGGTGGGTGCCCGGAGCGGTCTACGCC
CTCTACGGGATGTGGCCTCTCCTCCTGCTCTTGTTGGCGTTGCCCCAGCGAGCATACGCACTGGACACGGAGGTGGCCGCGTCGTGTGGCGGC
GTTGTTCTTGTCGGGTTGATGGCGCTGACTCTGTCACCATATTACAAGCACTATATCAGCTGGTGCATGTGGTGGCTTCAGTACTTTCTGACC
AGAGCAGAAGCGCAACTGCACGTGTGGGTTCCCCCTCTCAACGTCCGAGGGGGGCGTGACGCCGTCATCTTACTCACGTGTGTTGTACACCCG
ACTTTGGTATTTGACATCACCAAACTACTCCTGGCCGTTATCGGGCCCCTTTGGATCCTTCAAGCCAGTTTGCTTAAAGTACCCTACTTCGTG
CGCGTTCAGGGCCTTCTCCGAATCTGCGCACTAGCGCGGAAAATGGCCGGAGGCCATTACGTGCAAATGGCCATCATCAAGTTAGGGGCGCTT
ACTGGCACCTATGTCTACAACCATCTCACTCCCCTTCGAGACTGGGCGCACAACGGCCTGCGAGATCTGGCCGTGGCTGTGGAGCCAGTCGTC
TTCTCCCAAATGGAGACCAAGCTCATCACGTGGGGGGCAGACACCGCCGCGTGCGGTGACATCATCGACGGCTTGCCCGTCTCCGCCCGTAGG
GGCCGGGAGATATTGCTCGGGCCGGCCGATGGAATGGTCTCCAAGGGGTGGAGGTTGCTGGCGCCCATCACAGCGTACGCCCAGCAGACAAGG
GGCCTCCTAGGGTGTATAATCACCAGCCTGACTGGCCGGGACAAAAACCAAGCGGAGGGTGAGGTCCAGATTGTGTCAACTGCTGCCCAAACT
TTCCTGGCAACGTGCATCAATGGGGTATGCTGGACTGTCTACCACGGGGCCGGAACGAGGACCATTGCATCACCCAAGGGTCCTGTTATTCAG
ATGTACACCAATGTGGACAAAGACCTCGTGGGCTGGCCCGCCCCTCAAGGTACCCGCTCATTGACACCCTGCACCTGCGGCTCCTCGGACCTT
TACTTGGTCACGAGGCACGCCGATGTCATTCCCGTGCGCCGGCGAGGTGATAGCAGAGGCAGCCTACTTTCGCCCCGGCCCATTTCCTACTTG
AAAGGCTCCTCGGGGGGTCCACTGTTGTGCCCCGCGGGGCACGCCGTGGGCATATTCAGGGCCGCGGTGTGCACCCGTGGAGTGGCTAAAGCG
GTGGACTTTATCCCTGTGGAGAACCTAGAGACAACCATGAGGTCCCCGGTGTTCTCGGACAACTCCTCTCCACCAGCAGTGCCCCAGAGCTTC
CAGGTGGCTCACCTGCATGCTCCCACCGGCAGCGGTAAAAGCACCAAGGTCCCGGCCGCATACGCTGCTCAGGGCTACAAGGTGCTAGTGCTC
AACCCCTCTGTTGCCGCAACACTGGCCTTTGGCGCTTACATGTCCAAGGCCCATGGGGTCGATCCTAATGTCAGGACCGGGGTGAGAACAATT
ACCACTGGCAGCCCAATCACGTACTCCACCTACGGCAAGTTCCTTGCTGACGGCGGGTGCTCGGGGGGTGCCTATGACATAATAATTTGTGAC
GAGTGCCACTCCACGGATGCCACGTCCATCTTGGGCATCGGCACTGTCCTTGACCAAGCAGAGACCGCGGGGGCGAGGCTGGTTGTGCTCGCC
ACCGCTACCCCTCCGGGCTCCGTCACCGTGCCCCATCCTAACATCGAGGAGGTTGCTCTGTCCACCACCGGAGAGGTCCCCTTTTACGGCAAG
GCTATCCCCCTCGAGGTAATCAAGGGGGGGAGACATCTCATCTTCTGTCACTCAAAAAAGAAGTGCGACGAGCTCGCCGCAAAGCTGGTCGCG
TTGGGCATCAATGCCGTGGCCTACTACCGTGGCCTTGACGTGTCTGTCATCCCGACCAGCGGCGATGTTGTCGTCGTGGCGACCGATGCTCTC
ATGACCGGCTATACTGGCGACTTCGACTCGGTGATAGACTGCAACACGTGTGTCACCCAAACAGTCGACTTCAGCCTTGACCCTACCTTCACC
ATTGAGACAACCACGCTCCCCCAGGATGCTGTCTCCCGTACTCAACGCCGGGGCAGGACCGGCAGGGGGAAGTCAGGCATCTACAGATTCGTG
GCACCAGGGGAGCGCCCTTCCGGCATGTTCGACTCGTCCGTCCTCTGTGAGTGCTATGACGCGGGCTGTGCTTGGTATGAGCTCACGCCCGCT
GAGACCACTGTTAGGCTACGAGCGTACATGAACACCCCGGGGCTTCCTGTGTGCCAGGACCATCTTGAGTTTTGGGAGGGCGTTTTTACAGGC
CTCACCCACATAGATGCCCACTTTCTATCCCAGACAAAGCAGAGTGGGGAGAACCTTCCTTACCTGGTAGCGTACCAGGCCACCGTGTGCGCT
AGGGCTCAAGCCCCTCCCCCATCGTGGGACCAGATGTGGAAGTGTTTGATCCGCCTCAAGCCCACCCTCCATGGGCCAACACCTCTGCTATAC
AGACTGGGCGCTGTTCAGAATGAAGTCACCTTGACGCACCCAGTCACCAAATACATCATGACATGCA
Donor 65064/ Panel Number 10017/ Transmitted Variant #2 (SEQ ID NO: 18)
ACCAACCGTCGCCCACAGGACGTCAAGTTCCCGGGTGGCGGTCAGATCGTTGGTGGAGTTTACTTGTTGCCGCGCAGGGGCCCTAGATTGGGT
GTGCGCGCGACGAGGAAGACTTCCGAGCGGTCGCAACCTCGTGGTAGACGTCAGCCTATCCCCAAGGCACGTCGGCCCGAGGGCAGGGCCTGG
GCTCAGCCCGGGTACCCCTGGCCCCTCTATGGCAATGAGGGCTGCGGGTGGGCGGGATGGCTCCTGTCTCCCCGCGGCTCCCGGCCTAGTTGG
GGCCCCACGGACCCCCGGCGTAGGTCGCGCAATTTGGGTAAGGTCATCGATACCCTCACATGCGGCTTCGCCGACCTCATGGGGTACATACCG
CTCGTCGGCGCCCCTCTTGGAGGCGCTGCCAGGGCCCTGGCGCATGGCGTCCGGGTTCTGGAAGACGGCGTGAACTATGCAACAGGGAATCTT
CCTGGTTGCTCTTTCTCTATCTTCCTTCTGGCTCTGCTCTCTTGCCTGACTGTGCCCGCTTCAGCCTACCAAGTGCGCAACTCTACGGGGCTT
TACCATGTCACCAATGATTGCCCTAACTCGAGCATTGTGTACGAGGCGGCCGATGCCATCCTGCACACTCCGGGGTGTGTCCCTTGCGTCCGC
GAGGGTAACTCCTCGAGGTGTTGGGTGGCGGTGACCCCCACGGTGGCCACTAGGGACGGCAAGCTCCCCACAACGCAGCTTCGACGTCACATC
GATCTGCTTGTCGGGAGCGCCACCCTCTGCTCGGCCCTCTACGTGGGGGACCTGTGCGGGTCCGTCTTTCTTGTCGGTCAGCTGTTCACCTTC
TCTCCCAGGCAGCACTGGACGACGCAAGACTGCAATTGTTCTATCTATCCCGGCCATATAACGGGTCACCGCATGGCGTGGGATATGATGATG
AACTGGTCCCCTACGGCGGCATTGGTAGTAGCTCAGCTGCTCCGGATCCCACAAGCCATCTTGGACATGATCGCCGGTGCTCACTGGGGAGTC
CTGGCGGGCATGGCGTATTTCTCCATGGTGGGGAACTGGGCGAAGGTCTTGGTAGTGCTGCTGCTATTTGCCGGCGTCGACGCGTACACCCGC
GTCACTGGGGGAAGTGCCGCCTACACCACGTCTGGTCTTGCTAGGCTGTTCCAACCAGGCGCCCAGCAGAACATCCAGCTGATCAACACCAAC
GGCAGTTGGCACATCAATAGCACGGCCTTGAACTGCAACGCAAGCCTTGACACCGGCTGGTTAGCAGGACTTTTCTATTACAGCAAATTCAAC
TCTTCAGGCTGTCCTGAGAGGTTGGCCAGCTGCCGAAGCCTTGCCGACTTTGACCAGGGCTGGGGCCCCATCAGCCATGCCAATGGAAGCGGC
CCCGACCACCGCCCCTACTGCTGGCACTACCCCCCAAAACCTTGTGGTATTGTGCGCGCAAAGAGCGTGTGTGGCCCGGTATATTGCTTCACC
CCCAGCCCCGTGGTGGTGGGAACGACCGACAGGGCGGGTGCGCCTACCTACAACTGGGGCGCAAATGAAACGGACGTCTTCGTCCTTAACAAC
ACCAGGCCACCGCGGGGCAATTGGTTCGGTTGTACCTGGATGAACTCAACCGGATTCACCAAAGTGTGCGGAGCGCCCCCTTGTGCCATCGGA
GGGGTGGGCAACAACACCTTGCACTGCCCCACTGATTGTTTCCGCAAGCATCCGGAAGCCACGTACTCTCGGTGCGGTTCCGGTCCCTGGATC
ACACCCAGGTGCATGGTCCACTACCCGTATAGGCTCTGGCATTATCCCTGTACCATCAACTACACTTTATTTAAAGTCAGGATGTACGTGGGT
GGGGTCGAGCACAGGCTGGAAGCTGCCTGCAACTGGACGCGGGGCGAACGTTGTGATCTGGAAGACAGGGACAGGTCCGAGCTTAGCCCGTTG
CTGCTGTCCACCACACAGTGGCAGGTCCTCCCATGTTCCTTTACGACCCTGCCAGCCTTGTCCACCGGCCTCATCCACCTCCACCAGAACATT
GTGGACGTGCAGTATTTGTACGGGGTGGGGTCAAGCATCGCGTCCTGGGCCATTAAATGGGAGTACGTCGTCCTCCTGTTCCTTCTGCTCGCA
GACGCACGCGTCTGCTCTTGCTTGTGGATGATGTTACTCATATCCCAAGCGGAGGCGGCCTTGGAGAACCTCGTGGTACTCAATGCAGCATCC
CTGGCCGGGACGCACGGTCTTGTACCCTTCCTCGTGTTCTTCTGCTTTGCGTGGTACCTGAAGGGTAGGTGGGTGCCCGGAGCGGTCTACGCC
CTCTACGGGATGTGGCCTCTCCTCCTGCTCCTGTTGGCGTTGCCCCAGCGGGCATACGCACTGGACACGGAGGTGGCCGCGTCGTGTGGCGGC
GTTGTTCTTGTCGGGTTGATGGCGCTGACTCTGTCACCATATTACAAGCACTATATCAGCTGGTGCATGTGGTGGCTTCAGTACTTTCTGACC
AGAGCAGAAGCGCAACTGCACGTGTGGGTTCCCCCTCTCAACGTTCGAGGGGGGCGTGACGCCGTTATCTTACTCACGTGTGTTGTACACCCG
ACTTTGGTATTTGACATCACCAAACTACTCCTGGCCGTTATCGGGCCCCTTTGGATCCTTCAAGCCAGTTTGCTTAAAGTACCCTACTTCGTG
CGCGTTCAGGGCCTTCTCCGGATCTGCGCACTAGCGCGGAAAATGGCCGGAGGCCATTACGTGCAAATGGCCATCATCAAGTTAGGGGCGCTT
ACTGGCACCTATGTCTACAACCATCTCACTCCCCTTCGAGACTGGGCGCACAACGGCCTGCGAGATCTGGCCGTGGCTGTGGAGCCAGTCGTC
TTCTCCCAAATGGAGACCAAGCTCATCACGTGGGGGGCAGACACCGCCGCGTGCGGTGACATCATCGACGGCTTGCCCGTCTCCGCCCGTAGG
GGCCGGGAGATATTGCTCGGGCCGGCCGATGGAATGGTCTCCAAGGGGTGGAGGTTGCTGGCGCCCATCACAGCGTACGCCCAGCAGACAAGG
GGCCTCCTAGGGTGTATAATCACCAGCCTGACTGGCCGGGACAAAAACCAAGCGGAGGGTGAGGTCCAGATTGTGTCAACTGCTGCCCAAACT
TTCCTGGCAACGTGCATCAATGGGGTATGCTGGACTGTCTACCACGGGGCCGGAACGAGGACCATTGCATCACCCAAGGGTCCTGTTATTCAG
ATGTACACCAATGTGGACAAAGACCTCGTGGGCTGGCCCGCCCCTCAAGGTACCCGCTCATTGACACCCTGCACCTGCGGCTCCTCGGACCTT
TACCTGGTCACGAGGCACGCCGATGTCATTCCCGTGCGCCGGCGAGGTGATAGCAGAGGCAGCCTGCTTTCGCCCCGGCCCATTTCCTACTTG
AAAGGCTCCTCGGGGGGTCCGCTGTTGTGCCCCGCGGGGCACGCCGTGGGCATTTTCAGGGCCGCGGTGTGCACCCGTGGAGTGGCTAAAGCG
GTGGACTTTATCCCTGTGGAGAACCTAGAGACAACCATGAGGTCCCCGGTGTTCTCGGACAACTCCTCTCCACCAGCAGTGCCCCAGAGCTTC
CAGGTGGCTCACCTGCATGCTCCCACCGGCAGCGGTAAAAGCACCAAGGTCCCGGCCGCATACGCTGCTCAGGGCTACAAGGTGCTAGTGCTC
AACCCCTCTGTTGCCGCAACACTGGCCTTTGGCGCTTACATGTCCAAGGCCCATGGGGTCGATCCTAATGTCAGGACCGGGGTGAGAACAATT
ACCACTGGCAGCCCAATCACGTACTCCACCTACGGCAAGTTCCTTGCTGACGGCGGGTGCTCGGGGGGTGCCTATGACATAATAATTTGTGAC
GAGTGCCACTCCACGGATGCCACGTCTATCTTGGGCATCGGTACTGTCCTTGACCAAGCAGAGACCGCGGGGGCGAGGCTGGTTGTGCTCGCC
ACCGCTACCCCTCCGGGCTCCGTCACCGTGCCCCATCCTAACATCGAGGAGGTTGCTCTGTCCACCACCGGAGAGGTCCCCTTTTACGGCAAG
GCTATCCCCCTCGAGGTAATCAAGGGGGGGAGACATCTCATCTTCTGTCACTCAAAAAAGAAGTGCGACGAGCTCGCCGCAAAGCTGGTCGCG
TTGGGCATCAATGCCGTGGCCTACTACCGTGGCCTTGACGTGTCCGTCATCCCGACCAGCGGCGATGTTGTCGTCGTGGCGACCGATGCTCTC
ATGACCGGCTATACTGGCGACTTCGACTCGGTGATAGACTGCAACACGTGTGTCACCCAAACAGTCGACTTCAGCCTTGACCCTACCTTCACC
ATTGAGACAACCACGCTCCCCCAGGATGCTGTCTCCCGTACTCAACGCCGGGGCAGGACCGGCAGGGGGAAGTCAGGCATCTACAGATTCGTG
GCACCGGGGGAGCGCCCTTCCGGCATGTTCGACTCGTCCGTCCTCTGTGAGTGCTATGACGCGGGCTGTGCTTGGTATGAGCTCACGCCCGCT
GAGACCACTGTTAGGCTACGAGCGTACATGAACACCCCGGGGCTTCCTGTGTGCCAGGACCATCTTGAGTTTTGGGAGGGCGTCTTTACAGGC
CTCACCCACATAGATGCCCACTTTCTATCCCAGACAAAGCAGAGTGGGGAGAACCTTCCTTACCTGGTAGCGTACCAGGCCACCGTGTGCGCT
AGGGCTCAAGCCCCTCCCCCATCGTGGGACCAGATGTGGAAGTGTTTGATCCGCCTCAAGCCCACCCTCCATGGGCCAACACCTCTGCTATAC
AGACTGGGCGCTGTTCAGAATGAAGTCACCTTGACGCACCCAGTCACCAAATACATCATGACATGCA
Donor 67787/ Panel Number 10051/ Transmitted Variant #1 (SEQ ID NO: 19)
CCGCCCACAGGACGTCAAGTTCCCGGGCGGTGGTCAGATCGTTGGTGGAGTTTACCTGTTGCCGCGCAGGGGCCCCAGGTTGGGTGTGCGCGC
GACTAGGAAGACTTCCGAGCGGTCGCAACCTCGTGGAAGGCGACAACCTATCCCCAAGGCTCGCCAGCCCGAGGGTAGGGCCTGGGCTCAGCC
TGGGTACCCTTGGCCCCTCTATGGCAATGAGGGCTTGGGGTGGGCAGGATGGCTCCTGTCACCCCGTGGCTCTCGGCCTAGTTGGGGCCCCAC
GGACCCCCGGCGTAGGTCGCGTAATTTGGGTAAGGTCATCGATACCCTTACATGCGGCTTCGCCGACCTCATGGGGTACATTCCGCTCGTCGG
CGCCCCCTTAGGGGGCGCTGCCAGGGCCCTGGCGCATGGCGTCCGGGTTCTGGAGGACGGCGTGAATTATGCAACAGGGAATTTGCCCGGTTG
CTCTTTCTCTATCTTCCTTTTGGCTTTGCTGTCCTGTTTGACCATCCCAGTTTCCGCTTATGAGGTGCGCAACGTGTCCGGGGTGTATCATGT
CACGAACGACTGCTCCAACGCAAGCATTGTGTACGAGGCAACGGACGTGATCATGCATACCCCCGGGTGCGTGCCCTGCGTTCGGGAGGGCAA
TACCTCCCGCTGCTGGGCGGCGCTCACTCCCACACTCGCGGCCAGGAATTCCAGCGTCCCGACTACGACAATACGACGGCACGTCGATTTGCT
CGTTGGGGCGGCTGCTTTCTGTTCCGCTATGTACGTGGGGGATCTCTGCGGATCTGTTTTTCTCGTCTCCCAGCTGTTCACCTTCTCGCCTCG
CCGGCATGAGACGGTACAGGACTGCAATTGCTCAATCTATCCCGGCCACGTATCAGGTCACCGCATGGCTTGGGATATGATGATGAACTGGTC
ACCTACAACAGCCCTAGTGGTATCGCAGCTACTCCGGATCCCACAAGCTGTCGTGGACATGGTGGCGGGGGCCCACTGGGGAGTCCTGGCGGG
CCTTGCCTACTATTCCATGGTGGGGAACTGGGCTAAGGTCTTAATTGTGATGCTACTTTTTGCCGGCGTCGACGGGAGCACCTACACGACAGG
GGGGGCGCTGGGCCGTACCACCCACGGGCTTACGTCCTTCCTTTCAATTGGGCCGTCTCAGAAAATCCAGCTTATAAATACCAACGGCAGCTG
GCACATCAACAGAACTGCCTTGAACTGCAATGAGTCCCTCCACACTGGATGGCTCGCCGCGTTGTTCTACACAAACAAGTTCAACGCGTCCGG
ATGCCCGGAGCGCATGGCCAGCTGCCGCCCCATTGACACGTTCGATCAGGGGTGGGGTCCCATCACTCACGATGGGCAGGGCAGCTCGGACCA
GAGGCCCTACTGTTGGCACTACGCACCCCGACCGTGTGGTATTGTACCCGCGTCGGAGGTGTGTGGTCCAGTGTATTGCTTCACCCCGAGCCC
CGTTGTGGTGGGGACGACCGATCGTTCCGGCGTCCCTACGTATAGCTGGGGGGGGAATGAGACGGACGTGCTGCTCCTCAACAACACGCGGCC
GCCGCAAGGCAACTGGTTCGGCTGTACATGGATGAATAGCACTGGGTTCACCAAAACGTGCGGGGGCCCCCCGTGTAACATCAGGGGGAGCGG
CAATAACACTTTGACCTGCCCCACGGACTGCTTCCGGAAGCACCCCGAGGCCACTTACACCAAATGCGGTTCGGGGCCTTGGTTGACACCTAG
GTGCATGGTTGACTACCCATACAGGCTTTGGCACTACCCCTGCACTGTCAACTTCACCATCTTCAAGGTTAGGATGTATGTGGGGGGCGTGGA
GCACAGGCTCAACGCCGCGTGCAATTGGACTCGAGGAGAGCGTTGTGATTTGGAGGACAGGGATAGATCAGAGCTTAGCCCGCTGCTGCTGTC
TACAACAGAGTGGCAGATACTGCCCTGCTCCTTCACCACCTTACCGGCTCTGTCCACTGGTTTGATCCATCTCCATCAGAACATCGTGGACGT
GCAATACCTGTACGGTATAGGGTCGGCGGTTGTCTCCTTTGCAATCAAGTGGGAGTACATCGTGTTGCTCTTCCTTCTCCTGGCGGACGCGCG
CGTCTGCGCCTGCTTGTGGATGATGCTACTGATAGCTCAGGCCGAGGCTGCCCTAGAGAACCTGGTGGTTCTCAATGCGGCGTCCGTGGCCGG
GGCGCATGGCCTCCTCTCTTTTCTTGTGTTCTTCTGTGCTGCCTGGTACATCAAGGGCAGGTTGGTCCCTGGGGCGGCGTATGCCTTGTACGG
CGTATGGCCGCTACTCCTGCTCCTGTTGGCGTTGCCACCACGGGCATACGCCATGGACCGGGAGATGGCTGCATCGTGCGGAGGCGCGGTCTT
CATAGGTCTGGCACTCTTGACCTTGTCACCACACTATAAAGTGTTTCTCGCCCGGCTCATATGGTGGTTACAATATCTCATCACCAGAGCCGA
GGCGTGTTTGCATGTGTGGATCCCCCCCCTTAACGTTCGGGGGGGCCGCGATGCCATCATCCTCCTCACGTGTATGGTCCACCCAGAGCTAAT
CTTTACCATCACCAAGATCTTGCTCGCCATACTCGGTCCGCTCATGGTGCTCCAGGCTGGTCTAACCAAAGTGCCGTACTTTGTGCGTGCTCA
AGGGCTCATCCGTGTATGCATGTTGGTGCGGAAAGCCGCTGGGGGTCATTACGTCCAAATGGCTTTCATGAGGCTGGCCGCGCTGACGGGTAC
GTACATCTATGACCATCTTACCCCACTGCGGGACTGGGCCCACGCGGGCCTACGAGACCTTGCGGTGGCGGTTGAGCCCGTCGTCTTTTCTGA
CATGGAGACCAAGATCATCACCTGGGGGGCGGACACCGCAGCATGCGGGGACATCATCTCAGGCCTGCCCGTTTCCGCCCGGAGGGGGAGAGA
GATTTTTCTGGGACCGGCCGACGGTCTTGAAGGGCAGGGGTGGCGACTCCTCGCGCCTATCACGGCCTACTCCCAACAGACACGGGGCCTACT
TGGTTGTATCATCACTAGCCTCACAGGCCGGGACAAGAACCAGGTAGAGGGGGAGGTTCAAGTGGTTTCCACTGCAACACAATCTTTCCTGGC
GACCTGCATCAACGGCGTGTGTTGGACTGTCTACCATGGTGCCGGCTCAAAGACCCTAGCCGGCCCTAAGGGCCCAATCACCCAAATGTACAC
CAATGTAGACCAAGACCTCGTTGGCTGGCAAGCGCCCTCTGGGGCGCGCTCCTTGACACCGTGCACCTGCGGCAGCTCGGACCTTTACTTGGT
CACGAGGCATGCTGATGTCATACCGGTGCGCCGGCGGGGCGACAGCAGGGGGAGCTTACTCTCCCCCAGGCCCGTCTCCTACTTGAAGGGTTC
TTCGGGTGGTCCACTGCTTTGCCCCTCGGGGCACGCTGTAGGCATCTTCCGGGCTGCCGTGTGCACCCGGGGGGTTGCGAAGGCGGTGGACTT
CATACCCGTCGAATCTATGGAAACTACCATGCGGTCGCCGGTCTTCACGGACAACTCGTCCCCCCCGGCCGTACCGCAGACATTCCAAGTGGC
CCATCTACACGCCCCCACTGGCAGCGGCAAGAGCACCAAGGTGCCGGCTGCATATGCAGCCCAAGGGTACAAGGTACTTGTCCTGAACCCGTC
CGTCGCCGCCACTTTAGGTTTCGGGGCGTATATGTCCAAGGCACATGGTGTCGACCCTAACATTAGAACTGGGGTAAGGACCATCACCACGGG
CGCCCCTATTACGTACTCCACCTACGGCAAGTTCCTTGCCGACGGTGGTTGTTCTGGAGGCGCCTATGACATCATAATATGTGATGAATGCCA
CTCAACTGACTCGACCAGCATCTTGGGCATCGGCACAGTCCTGGACCAAGCGGAGACGGCTGGAGCGCGGCTTGTCGTGCTCGCCACCGCTAC
GCCTCCGGGATCAGTCACCGTGCCACATCCCAATATCGAGGAGGTGGCTCTGTCCAACATTGGAGAGATCCCCTTCTACGGCAAAGCCATCCC
CATCGAGACCATCAAGGGGGGGAGGCATCTCATTTTCTGCCATTCCAAAAAGAAATGTGACGAACTCGCCGCAAAGCTGACGGGCCTTGGAAT
CAATGCCGTAGCATATTACAGGGGCCTCGATGTGTCCGTCATACCGACCAGCGGAGACGTCGTTGTCGTGGCAACAGACGCTCTAATGACGGG
CTTTACTGGCGATTTTGACTCAGTGATCGACTGTAATACATGTGTCACCCAGACAGTCGATTTCAGCTTGGACCCTACCTTCACCATTGAGAC
CACGACCGTGCCCCAAGACGCGGTGTCGCGCTCACAGCGGCGAGGCAGGACTGGTAGGGGCAGGACAGGCATCTACAGGTTTGTGACTCCAGG
AGAACGGCCTTCGGGCATGTTCGATTCCTCGGTCCTGTGTGAGTGCTATGACGCGGGCTGTGCTTGGTACGAGCTCACACCCGCCGAGACCTC
AGTTAGGCTGCGGGCTTACCTAAATACACCAGGGTTGCCCGTTTGCCAGGACCATCTGGAGTTCTGGGAGAGCGTCTTCACAGGCCTCACCCA
CATAGATGCCCACTTCTTGTCCCAGACTAAACAGGCAGGAGACAACTTTCCCTACCTGGTAGCATACCAGGCTACGGTGTGCGCCAGGGCCCA
GGCTCCACCTCCATCGTGGGATCAAATGTGGAAGTGCCTCATACGGCTAAAGCCTACGCTGCACGGGCCAACACCCCTGCTGTATAGGCTAGG
AGCCGTCCAAAACGAGGTCACCCTCACACACCCCATAACCAAATACATCATGGCATGCATGTCGGCTGA
Donor 61067/ Panel Number 6213/ Transmitted Variant #1 (SEQ ID NO: 20)
CAACCGTCGCCCACAGGACGTTAAGTTCCCGGGTGGCGGTCAGATCGTTGGTGGAGTTTACTTGTTGCCGCGCAGGGGCCCTAGATTGGGTGT
GCGCGCGACGAGGAAGACTTCCGAGCGGTCGCAACCTCGCGGTAGACGTCAGCCTATCCCCAAGGCGCGTCGGCCCGAGGGCAGGACCTGGGC
TCAGCCCGGGTACCCCTGGCCCCTCTACGGCAATGAGGGCTGCGGGTGGGCGGGATGGCTCCTGTCCCCCCGTGGCTCTCGGCCTAGCTGGGG
CCCCACAGACCCCCGGCGTAGGTCGCGCAATTTGGGTAAGGTCATCGACACCCTCACGTGCGGCTTCGCCGACCTCATGGGGTACATTCCGCT
CGTCGGCGCCCCTCTTGGGGGCGCTGCCAGGGCCCTGGCGCATGGCGTCCGGGTCCTGGAAGACGGCGTGAATTATGCAACAGGGAACCTTCC
TGGTTGCTCTTTTTCTATCTTCCTTCTGGCCCTGCTCTCTTGCCTGACCGTGCCCGCGTCGGCCTATCAAGTACGCAACTCCTCGGGCCTCTA
CCATGTCACCAATGATTGCCCTAACTCGAGTATTGTGTACGAGACGGCCGATACCATTCTACATTCTCCGGGGTGTGTCCCTTGCGTTCGCGA
GGGTAACGCCTCGAAATGTTGGGTGGCGGTGGCCCCCACAGTCGCCACCAGGGATGGCAGACTCCCCACAACGCAGCTTCGACGTCACATCGA
TCTGCTTGTCGGGAGCGCCACCCTCTGCTCGGCCCTCTATGTGGGGGACTTGTGCGGGTCTGTCTTCCTTGTCGGTCAACTGTTCACTTTCTC
CCCCAGGCGCCACTGGACAACGCAAGACTGCAACTGTTCTATCTACCCCGGCCATATAACGGGTCACCGCATGGCATGGGATATGATGATGAA
CTGGTCCCCTACAGCAGCGCTGGTAGTAGCTCAGCTGCTCAGGGTCCCGCAAGCCATCTTGGACATGATCGCTGGTGCCCACTGGGGAGTCCT
AGCGGGCATAGCGTATTTCTCCATGGTGGGGAACTGGGCGAAGGTCTTAGTGGTGCTGTTGCTGTTTGCCGGCGTTGATGCGGGAACCCACAT
CACCGGGGGGAGTGTCGCTCATTCCACGGCACGACTCACCGGTCTTTTCAGTCGTGGCTCCCAGCAGCATATCCAGCTGATCAACACCAACGG
CAGTTGGCACATCAATCGCACGGCCCTGAACTGTAATGAAAGCCTCAACACTGGCTGGCTAGCGGGGCTCTTCTATTCCAACAAATTCAACTC
TTCAGGCTGCCCCGAGAGGTTGGCCAGCTGTAGACCCCTTGCCGATTTCGACCAGGGCTGGGGTCCTATCAGCTACGCCAACGGAAGCGGCCC
CGACCACCGGCCCTACTGCTGGCACTACCCCCCAAAGCCTTGTGGTATCGTGCCAGCACAGAGCGTATGTGGCCCAGTGTATTGCTTCACACC
CAGCCCCGTGGTGGTGGGAACGACCAACAAGTTGGGCGCGCCTACCTACAACTGGGGTTGCAATGATACGGACGTCTTCGTCCTTAATAACAC
CAGGCCGCCGTTGGGCAATTGGTTCGGTTGCACCTGGATGAACTCATCTGGATTTACCAAAGTGTGCGGAGCGCCTCCTTGTGTCATCGGAGG
GGGGGGCAACAACACCTTGCACTGCCCCACTGACTGTTTCCGCAAGCATCCGGAAGCCACATACTCTCGGTGTGGCTCCGGTCCCTGGATCAC
GCCCAGGTGCCTGGTCCACTATCCTTATAGGCTTTGGCATTATCCTTGTACTGTCAACTACACCATGTTCAAAGTCAGGATGTACGTGGGAGG
GGTCGAGCACAGGCTGGACGTTGCTTGCAACTGGACGCGGGGCGAGCGTTGCGATCTGGACGACAGGGACAGGTCCGAGCTCAGCCCGCTGCT
GCTGTCCACCACACAGTGGCAGGTCCTTCCGTGTTCCTTTACCACCTTGCCAGCCTTGACTACCGGCCTCATCCACCTCCACCAGAACATCGT
GGATGTGCAATACTTGTACGGGGTGGGGTCAAGCATTGTGTCCTGGGCCATCAAGTGGGAATACGTCATCCTCTTATTTCTCCTGCTTGCAGA
CGCGCGCATCTGCTCCTGCTTGTGGATGATGCTACTCATATCCCAAGCGGAGGCAGCGTTGGAGAACCTTGTGTTGCTCAACGCGGCGTCTCT
GGCCGGGACGCATGGCCTTGCGTCCTTCCTCGTGTTTTTCTGCTTTGCATGGTATCTGAAGGGTAAGTGGGCGCCCGGAGCAGCCTACGCCTT
CTACGGGATGTGGCCTCTCCTCCTGCTCCTGTTGGCGTTGCCCCAGCGGGCATACGCGCTGGACACGGAGATGGCCGCGTCGTGTGGCGGCGT
TGTTATTGTCGGGTTAATGGCGCTGACTCTGTCACCGCACTACAAGCGCTACATCAGCTGGTGCTTATGGTGGCTTCAGTATTTCTTGACCAG
AGTAGAAGCGCAACTGCACGTGTGGGTTCCCCCCCTCAACGTCCGGGGGGGGCGTGACGCTGTCATCCTACTCATGTGTGCTGTACACCCGGC
TTTGGTATTTGACATCACCAAGCTGCTGTTGGCCGTCTTCGGCCCTCTTTGGATTCTTCAAACCAGTCTGCTCAAAGTGCCCTATTTCGTGCG
CGTTCAAGGCCTTCTCCGGATCTGCGCGCTAGCGCGCAAGATGGCCGGCGGCCATTACGTGCAAATGGCCATCATCAAGATGGGGGCGCTTAC
TGGCACCTATGTTTATAACCATCTCACTCCTCTTCGGGACTGGGCGCACAACGGCCTACGAGATCTGGCCGTGGCTGTAGAGCCAGTCGTCTT
CTCCCAGATGGAGACCAAGCTCATCACGTGGGGGGCGGACACCGCCGCGTGCGGTGACATCATCAACGGCTTGCCCGTCTCTGCCCGTAGGGG
CCGAGAGATACTGCTCGGACCGGCCGATGGAATGGTCTCCAAGGGGTGGAGGTTGCTGGCGCCCATCACGGCGTATGCCCAGCAGACAAGGGG
CCTCTTGGGATGCATAATAACCAGCCTGACCGGCCGGGACAAAAACCAGGTGGAGGGTGAGGTTCAGATTGTGTCAACTGCTGCCCAGACCTT
TCTGGCAACCTGCATCAACGGGGTGTGCTGGACTGTCTACCACGGGGCCGGAACAAGGACCATCGCATCACCCAAAGGTCCTGTTATCCAGAT
GTACACCAATGTAGACCAAGACCTCGTAGGCTGGCCCGCTCCCCAAGGTGCCCGCTCATTGACACCCTGCACTTGCGGCTCCTCGGACCTTTA
CCTGGTCACGAGGCACGCCGATGTCATTCCCGTACGCCGACGGGGTGATAGCAGGGGCAGCCTGCTTTCGCCCCGGCCTATCTCTTACTTGAA
AGGCTCCTCGGGGGGTCCACTACTGTGCCCCGCGGGACACGCCGTAGGCATATTCAGGGCCGCGGTGTGCACCCGTGGAGTGGCTAAGGCGGT
GGACTTTATCCCCGTAGAGAGCCTAGAGACAACCATGAGGTCCCCGGTGTTCACAGACAATTCCTCCCCACCAGCAGTGCCCCAGAGCTTCCA
GGTGGCTCACCTGCATGCTCCCACCGGCAGCGGTAAGAGCACCAAGGTCCCGGCCGCATACGCGGCTCAGGGGTACAAGGTGTTGGTGCTCAA
CCCCTCCGTTGCTGCAACACTGGGTTTTGGTGCCTACATGTCCAAGGCCCATGGGGTTGATCCTAACATCAGGACTGGGGTGAGGACAATTAC
TACTGGCAGCTCCATCACGTACTCCACCTACGGCAAGTTCCTCGCCGACGGCGGGTGCTCGGGGGGTGCTTATGACATAATAATTTGTGACGA
GTGCCACTCCACGGATGCAACATCTATCTTGGGCATCGGCACCGTCCTTGACCAAGCAGAGACTGCGGGGGCGAGACTGGTTGTGCTCGCCAC
CGCTACTCCTCCGGGCTCCGTCACCGTGCCCCATCCTAACATCGAGGAGGTTGCTCTGTCTACCACCGGAGAGATCCCCTTTTACGGCAAGGC
TATCCCCCTTGAGGCAATCAAGGGAGGGAGACATCTCATTTTCTGCCACTCAAAGAAGAAGTGCGACGAGCTCGCCGCAAAACTGGTCGCGAT
GGGCATCAATGCCGTGGCTTACTACCGCGGCCTTGACGTGTCCGTCATCCCGACCAGTGGCGACGTTGTCGTTGTGGCAACTGATGCTCTCAT
GACCGGCTATACCGGCGACTTCGACTCGGTGATAGACTGCAACACGTGTGTCACCCAGACAGTCGACTTCAGCCTTGACCCTACCTTCACCAT
TGAGACAACCACACTTCCTCAGGACGCTGTCTCCCGCACCCAACGTCGGGGCAGGACTGGCAGGGGGAAGCCAGGCATCTACAGATTTGTGGC
ACCGGGAGAGCGCCCTTCCGGCATGTTCGACTCGTCCGTCCTCTGTGAGTGCTATGACGCAGGCTGTGCTTGGTATGAGCTCACACCCGCCGA
GACCACAGTCAGGCTACGAGCATACATGAACACTCCGGGGCTTCCCGTGTGCCAAGACCATCTTGAATTTTGGGAGGGCGTCTTCACGGGTCT
CACCCATATAGACGCCCACTTCCTATCTCAGACAAAGCAGAGTGGGGAAAACTTTCCTTACCTGGTAGCGTACCAAGCCACCGTGTGCGCTAG
AGCTCAAGCTCCCCCCCCATCGTGGGACCAGATGTGGAAGTGCTTGATCCGCCTCAAACCCACCCTCCATGGGCCAACACCTCTGCTATACAG
GCTGGGCGCGGTTCAGAATGAAGTCACCCTGACGCACCCAATCACCAAGTACATCATGACATGCATGTCGGCT
Donor 61067/ Panel Number 6213/ Transmitted Variant #2 (SEQ ID NO: 21)
CAACCGTCGCCCACAGGACGTCAAGTTCCCGGGTGGCGGTCAGATCGTTGGTGGAGTTTATTTGTTGCCGCGCAGGGGCCCTAGATTGGGTGT
GCGCGCGACGAGGAAGACTTCCGAGCGGTCGCAACCTCGAGGTAGACGTCAGCCTATCCCCAAGGCGCGTCGGCCCGAGGGCAGGACCTGGGC
TCAGCCCGGGTACCCTTGGCCCCTCTATGGCAATGAGGGCTGCGGGTGGGCGGGATGGCTCCTGTCCCCCCGTGGCTCTCGGCCTAGCTGGGG
CCCCACAGACCCCCGGCGTAGGTCGCGCAATTTGGGTAAGGTCATCGATACCCTCACGTGCGGCTTCGCCGACCTCATGGGGTACATTCCGCT
CGTCGGCGCCCCTCTTGGAGGCGCTGCCAGGGCCCTGGCGCATGGCGTCCGGGTTCTGGAAGACGGCGTGAACTATGCAACAGGGAATCTTCC
CGGTTGCTCTTTCTCTATCTTCCTTCTGGCTCTGCTCTCTTGCCTGACCGTGCCCGCGTCGGCCTACCAAGTACGCAACTCCTCGGGCCTTTA
TCATGTCACCAATGATTGCCCCAACTCGAGTATTGTGTACGAGACGGCCGATACCATCCTACATTCTCCGGGGTGTGTCCCTTGCGTTCGCGA
GGGTAACACCTCAAAATGTTGGGTGCCAGTGTCCCCCACAGTGGCCACCAGGGACGGCAAACTCCCCGCGACGCAGCTTCGACGTCACATCGA
TCTGCTTGTCGGGAGTGCCACCCTCTGTTCAGCCCTATATGTGGGGGACTTGTGCGGGTCTGTCTTTCTTGTCGGTCAACTGTTCACTTTCTC
CCCCAGGCGCCACTGGACAACGCAAGACTGCAACTGCTCTATCTACCCCGGCCATATAACGGGTCACCGCATGGCATGGGATATGATGATGAA
CTGGTCCCCTACAACAGCGCTGGTAGTAGCTCAGCTGCTCAGGGTTCCGCAAGCCATCTTGGATATGATCGCGGGTGCCCACTGGGGGGTCCT
AGCGGGCATAGCGTATTTTTCCATGGTGGGGAACTGGGCGAAGGTCCTGGTAGTGCTGTTGCTGTTTGCCAGCGTCGATGCGGAAACCCGCAC
CACCGGGGGGAGTGCTGCTCACACCACGTTTGGACTCGCCAGTTTATTCAATCCGGGCCCCAGCCAGAAAATCCAGCTGATTAACAGCAACGG
CAGTTGGCACATCAATCGCACAGCCTTGAACTGTAATGCGAGCCTCGACACTGGCTGGGTGGCGGGGCTCCTCTATTACCACAAGTTCAACTC
TTCGGGCTGCACCGAGAGGATGGCCAGCTGTAGACCCCTTGCCAATTTCGCCCAGGGCTGGGGCCCTATCAGCTACGCCAACGGAAGCGGCCC
CGAACACCGCCCCTACTGCTGGCACTACCCTCCAAAACCTTGTGGTATCGTGCCAGCGCTGAATGTATGTGGCCCAGTGTACTGCTTCACTCC
CAGCCCCGTGGTAGTGGGGACGACCGACAAGTTGGGCGCGCCCACCTACAAATGGGGTGCCAATGAGACGGACGTCTTCATTCTTAATAACAC
CAGGCCACCGTTGGGCAATTGGTTTGGTTGCACCTGGATGAATTCATCTGGATTTACCAAAGTGTGCGGAGCGCCTCCTTGTAACATCGGAGG
GATGGGCAACAACACCTTGCACTGCCCCACTGATTGTTTCCGCAAGCATCCGGAAGCCACATACTCTCGGTGTGGCTCCGGCCCCTGGCTCAC
GCCCAGGTGCTTGGTCCACTATGCTTATAGGCTTTGGCATTATCCTTGTACCGTCAACTACACCATGTTCAAAGTCAGGATGTACGTGGGAGG
GGTCGAGCACAGGCTGGACGTGGCCTGCAACTGGACGCGGGGCGAACCTTGTGATCTGGACGACAGGGACAGGTCCGAGCTCAGCCCGCTGCT
GCTGTCCACCACACAGTGGCAGGTCCTTCCGTGCTCCTTCACGACCCTGCCAGCCTTGACTACCGGCCTCATCCACCTCCACCAGAATATCGT
GGACGTGCAATACTTGTACGGGGTGGGGTCGAGCATTGTGTCCTGGGCCATCAAGTGGGAGTACGTCATCCTCTTGTTTCTCCTGCTTGCAGA
CGCGCGCATCTGCTCCTGCTTGTGGATGATGTTGCTCATATCCCAAGCGGAGGCAGCTTTGGAAAATCTTGTATTGCTCAATGCGGCGTCTCT
GGCCGGGACGCACGGTCTTGTGTCCTTCCTCGTGTTTTTCTGCTTTGCATGGTATCTGAAGGGTAGGTGGGTGCCCGGGGTGGCCTACGCCTG
CTACGGGATGTGGCCCTTCCTCCTGCTCCTGTTGGCGTTGCCCCAACGGGCATACGCGCTGGACACGGAGATGGCCGCGTCGTGTGGCGGCAT
TGTTCTTGCCGGGTTAATGGCGCTGACTCTGTCACCGCATTACAAGCGCTATATCAGCTGGTGCTTATGGTGGCTTCAGTATTTCCTGACTAG
AGTAGAAGCGCAACTGCACGTGTGGGTTCCCCCCCTCAACGTTCGAGGGGGGCGCGACGCTGTCATCCTACTCATGTGTGTTGTACACCCGGC
TTTGGTATTTGACATCACCAAGCTACTGCTGGCTGTCTTCGGACCCCTTTGGATTCTTCAGGCCAGTCTGCTCAAAGTGCCCTACTTCGTGCG
CGTTCAAGGCCTTCTCCGGATCTGCGCGCTAGTGCGCAAGGTGGCCGGAGGCCATTACGTGCAGATGGTCATCATCAAGATGGGGGCGCTTGT
TGGCACTTATGTCTATAACCATCTCACTCCTCTTCGGGACTGGGCGCACAACGGCCTGCAAGATCTGGCCGTGGCTGTAGAGCCAGTCGTCTT
CTCCCAAATGGAGACCAAGCTCATCACGTGGGGGGCGGACACCGCCGCGTGCGGTGACATCATCGACGGCTTGCCCGTCTCCGCCCGCAGGGG
CCGAGAGATACTGCTCGGACCGGCTGATGGGATGGTCTCAAAGGGGTGGAGGTTGCTGGCGCCCATCACGGCGTATGCCCAGCAGACAAGGGG
CCTCTTGGGATGCATAATCACCAGCCTGACCGGCCGGGACAAAAACCAGGTGGAGGGTGAGGTTCAAATTGTGTCAACTGCTACCCAGACCTT
CCTGGCGACCTGCATCAACGGGGTGTGCTGGACTGTCTACCACGGGGCCGGAACAAGGACCATCGCGTCGCCCAAGGGCCCTGTCATCCAAAT
GTATACCAATGTGGACCAAGATCTCGTAGGCTGGCCCGCTCCCCAAGGCGCCCGCTCATTGACACCCTGCGCTTGTGGCTCCTCGGACCTTTA
CCTGGTCACGAGGCACGCCGATGTCATTCCTGTGCGCAGGCGGGGTGATAGCAGAGGCAGCCTGCTTTCGCCCCGGCCCATCTCTTACTTGAA
AGGCTCCTCGGGGGGCCCGCTGCTGTGCCCCGCGGGACACGCCGTAGGCATATTCAGAGCTGCGGTGTGCACTCGTGGAGTGGCCAAGGCGGT
GGACTTCATCCCCGTAGAGAGCTTGGAAACAACCATGAGGTCTCCGGTGTTCACAGACAACTCTTCTCCACCAGCAGTGCCCCAGTGCTTCCA
AGTGGCCCACCTACATGCTCCCACCGGCAGCGGTAAGAGTACCAAGGTCCCGGCCGCGTACGCGGCTCAGGGCTACAAGGTGCTGGTGCTCAA
CCCCTCCGTTGCTGCAACGCTGGGCTTTGGTGCTTACATGTCCAAGGCCCATGGGATTGATCCTAACATCAGGACTGGGGTGAGGACAATTAC
TACTGGCAGCCCCATCACGTACTCCACCTACGGCAAGTTTCTTGCCGACGGCGGGTGCTCAGGGGGCGCTTATGACATAATAATTTGTGACGA
GTGCCACTCCACGGATGCAACATCCATCTTGGGCATCGGCACTGTCCTTGACCAAGCAGAGACTGCGGGGGCGAGACTGGTTGTGCTCGCCAC
CGCTACCCCTCCGGGTTCCGTCACCGTGCCCCACCCTAACATCGAGGAGGTTGCTCTGTCCACCACCGGAGAGATTCCTTTTTATGGCAAGGC
TATCCCCCTTGAGACAATCAAGGGGGGGAGACATCTCATTTTTTGCCACTCAAAGAAGAAGTGCGACGAGCTCGCTGCAAAGCTGGTCGCGAT
GGGCGTCAACGCCGTGGCCTACTACCGCGGCCTTGACGTGTCCGTCATCCCGACCAGCGGCGATGTTGTCGTCGTGGCAACTGATGCTCTCAT
GACCGGCTTTACCGGCGACTTCGACTCGGTGATAGATTGCAACACGTGTGTCACCCAGACAGTCGACTTCAGCCTTGATCCTACCTTCACCAT
TGAGACGACCACGCTCCCCCAGGACGCCGTCTCCCGCACTCAACGTCGGGGGAGGACTGGCAGGGGGAAGCCAGGCATCTACAGATTTGTGGC
ACCGGGGGAACGCCCTTCCGGCATGTTCGACTCGTCCGTCCTCTGCGAGTGCTATGACGCGGGCTGTGCTTGGTATGAACTCACACCCGCCGA
GACCACAGTTAGGCTGCGAGCGTACATGAACACCCCGGGGCTCCCCGTGTGCCAAGACCATCTTGAATTTTGGGAGGGCGTCTTTACGGGTCT
CACCCACATAGACGCCCACTTCCTATCTCAGACAAAGCAGAGTGGGGAAAACCTTCCTTACCTGGTAGCGTACCAAGCCACCGTGTGCGCTAG
GGCCCAAGCCCCTCCTCCATCGTGGGACCAAATGTGGAAGTGCCTGATCCGCCTCAAGCCCACCCTTCATGGGCCGACACCTCTGCTATACAG
ACTGGGTGCTGTTCAGAATGAGGTCACCCTGACACACCCAGTCACCAAGTACATCATGACATGCATGTCGGCT
Donor 62286/ Panel Number 6222/ Transmitted Variant #1 (SEQ ID NO: 22)
ACACCAACCGTCGCCCACAGGACGTCAAGTTCCCGGGTGGCGGCCAGATCGTTGGTGGAGTTTACTTGTTGCCGCGCAGGGGCCCTAGATTGG
GTGTGCGCGCGACGAGGAAGACTTCCGAGCGGTCGCAACCTCGAGGTAGACGTCAGCCTATCCCCAAGGCGCGTCGGCCCGAGGGCAGGACCT
GGGCCCAGCCCGGGTACCCTTGGCCCCTCTATGGCAATGAGGGCTGCGGATGGGCGGGATGGCTCCTGTCCCCCCGTGGCTCTCGGCCTAGCT
GGGGCCCCACAGACCCCCGGCGTAGGTCGCGCAATTTGGGTAAGGTCATCGATACCCTCACGTGCGGCTTCGCCGACCTCATGGGGTACATTC
CGCTCGTCGGCGCCCCTCTCGGAGGCGCTGCCAGGGCCCTGGCGCATGGCGTCCGGGTTCTGGAAGACGGCGTGAACTATGCAACAGGGAACC
TTCCTGGTTGCTCTTTCTCTATCTTCCTTCTGGCCCTGCTCTCTTGCCTGACTGTGCCCGCATCAGCCTATCAAGTACGCAACTCTTCGGGCC
TCTACCATGTCACCAATGATTGCCCTAACTCGAGTATTGTGTACGAGACGGCCGATACCATCCTACACTCTCCGGGGTGTGTCCCTTGCGTTC
GCGAGGGTAACGCCTCGAAATGTTGGGTGGCTGTGGCCCCCACGGTCGCCACCAGGGACGGCAAGCTCCCCGCAACGCAGCTTCGACGTCACA
TCGATCTGCTTGTCGGGGGCGCCACCCTCTGCTCGGCCCTCTACGTGGGGGACTTGTGCGGGTCCATCTTTCTTGTCGGCCAACTGTTCACGT
TCTCCCCCAGGCGCCACTGGACAACGCAAGACTGCAACTGTTCTATCTACCCCGGCCACATAACGGGTCATCGCATGGCATGGGATATGATGA
TGAACTGGTCCCCTACAACAGCGCTGGTAGTAGCCCAGCTGCTCAGGGTTCCACAAGCCATCTTGGATATGATCGCTGGTGCTCACTGGGGTG
TCCTAGCGGGCATAGCGTATTTTTCCATGGTGGGGAACTGGGCGAAGGTTCTGGTGGTGCTGCTGCTGTTTGCCGGCGTCGATGCGGCAACCT
ACACCACCGGGGGAGCTGCTGCCAGGACCGCGTCCACGTTCGCCGGCCTTTTCGATACGGGCGCCAAGCAGAATATCCAGCTGATCAACACCA
ACGGCAGTTGGCACATCAATCGCACGGCCTTGAATTGTAATGCGAGCCTCGACACTGGCTGGGTAGCGGGGCTCTTCTATTACCAAAAATTCA
ACTCCTCAGGCTGCCCCGAGAGGATGGCCAGCTGTAAGCCCCTCGCCGATTTCGACCAAGGCTGGGGCCCTATCAGCTACGCCAACGGAAGCG
GCCCCGAACACCGCCCCTACTGCTGGCACTACCCCCCAAAGCCTTGTGGTATCGTGCCAGCGCAGAACGTATGTGGCCCAGTGTATTGCTTCA
CTCCTAGCCCCGTGGTGGTGGGAACAACCGACAAGCGGGGTGCGCCTACCTACAACTGGGGTGGCAATGACACGGACGTCCTCGTCCTTAATA
ACACCAGGCCACCGCTGGGCAATTGGTTCGGTTGCACCTGGATGAACTCATCTGGATTTACCAAAGTGTGCGGAGCGCCTCCTTGTGTCATCG
GAGGAGTGGGCAACAACACCTTGCACTGCCCCACTGACTGTTTCCGCAAGCATCCAGAGGCCACATACTCTCGGTGTGGCTCCGGTCCCTGGA
TCACGCCCAGGTGCATGGTCCACTATCCTTACAGGCTTTGGCATTATCCTTGCACCGTCAACTACACCGTGTTCAAAGTCAGGATGTACGTGG
GAGGGGTCGAGCACAGGCTGGAAGTTGCTTGCAACTGGACGCGGGGCGAGCGTTGTGATCTGGACGACAGGGACAGGTCCGAGCTCAGCCCGC
TACTGCTGTCCACCACACAGTGGCAGGTCCTTCCATGCTCCTTCACGACCTTGCCAGCCTTGACCACCGGCCTCATCCACCTCCACCAGAACA
TCGTGGACGTGCAATATTTGTACGGGGTGGGGTCAAGCATCGTGTCCTGGGCCATCAAGTGGGAGTATGTCATCCTCTTGTTTCTCCTGCTTG
CAGATGCGCGCATCTGCTCCTGCTTGTGGATGATGCTACTCATATCCCAGGCGGAAGCAGCTTTGGAGAACCTCGTGGTGCTCAATGCGGCGT
CTCTGGCCGGGACGCATGGTCTTGTGTCCTTCCTCGTGTTCTTCTGCTTTGCATGGTACCTGAGGGGTAAGTGGGTGCCCGGAGCGGCCTACG
CCTTCTACGGGATGTGGCCTCTCCTCCTGCTCCTGTTGGCGTTGCCCCAGCGGGCATACGCGCTAGACACGGAGACGACCGCGTCGTGTGGCG
GCATTGTTCTTGTCGGGTTAATGGCGCTGACTCTGTCACCGCATTACAAGCGCTATGTCAGCTGGTGCTTATGGTGGCTTCAGTATTTCCTGA
CCAGAGTAGAAGCGCAACTGCACGTGTGGGTCCCCCCCCTCAACGTCCGGGGGGGGCGTGACGCTGTCATCTTACTCACGTGTGTCGTACACC
CGGCCTTGGTATTTGACATCACCAAGCTGCTGCTGGCCGTCTTCGGACCCCTTTGGATTCTTCAAACCAGCCTGCTCAAAGTGCCCTACTTCG
TGCGCGTCCAAGGCCTTCTCCGGATCTGCGCGCTAGTGCGCGAGATGGCCGGAGGCCATTACGTGCAGATGGCCATCATCAAGATGGGGGCGC
TTACTGGCACCTATGTTTATAACCATCTCACCCCTCTTCGGGACTGGGCGCACAACGGCCTACGAGATCTGGCCGTGGCTGTGGAGCCAGTCG
TCTTTTCCCAGATGGAGACCAAGCTCATTACGTGGGGGGCGGACACCGCCGCATGTGGTGACATCATCAACGGCTTGCCCGTCTCCGCCCGTA
GGGGCCGAGAGATATTGCTCGGACCGGCCGACGGGATGGTCTCTAAAGGGTGGAGGTTGCTGGCGCCTATCACGGCGTACGCCCAGCAGACAA
GGGGCCTCTTGGGGTGCATAATTACCAGCCTGACCGGCCGGGACAAAAACCAGGTGGAGGGTGAGGTCCAGATTGTGTCAACTGCTGCCCAGA
CCTTCCTGGCAACCTGCATCAACGGGGTGTGCTGGACTGTCTACCACGGAGCCGGAACAAGGACCATCGCGTCACCCAGGGGTCCTGTTATCC
AGATGTACACCAATGTAGACCAAGACTTAGTAGGCTGGCCCGCTCCCCAAGGTGCCCGCTCATTGACACCCTGCACTTGCGGCTCCTCGGACC
TTTACCTGGTCACGAGGCACGCCGATGTCATTCCCGTGCGCCGGCGGGGTGACAGCAGAGGCAGTCTGCTTTCGCCCCGGCCCATCTCTTACT
TAAAAGGCTCCTCGGGGGGCCCACTGCTGTGCCCCGCGGGACACGCCGTAGGCATATTCAGAGCCGCGGTGTGCACCCGTGGAGTGGCTAAGG
CGGTGGACTTCATCCCCGTAGAGAACCTAGAGACAACCATGAGGTCCCCGGTGTTCACAGACAACTCCTCTCCACCAGCAGTGCCCCAGAGCT
TCCAGGTGGCCCACCTGCATGCTCCCACCGGCAGCGGTAAGAGCACCAAGGTCCCGGCCGCATATGCTGCTCAGGGCTACAAGGTGCTGGTGC
TCAACCCTTCCGTTGCAGCAACATTGGGCTTTGGTGCTTATATGTCCAAGGCCCATGGGATTGATCCTAACATCAGGACTGGGGTGAGGACAA
TTACCACTGGCAGCCCCATCACGTACTCCACCTATGGCAAGTTTCTTGCCGACGGCGGGTGCTCGGGGGGTGCTTATGACATAATAATTTGTG
ACGAGTGCCACTCCACGGATGCAACATCCATCTTGGGCATCGGCACCGTCCTTGACCAAGCAGAGACTGCGGGGGCAAGACTGGTTGTGCTTG
CCACCGCCACCCCTCCGGGCTCCGTCACCGTGCCCCATCATAACATCGAGGAGGTTGCTCTGTCCACCACCGGAGAGATCCCCTTCTATGGCA
AGGCTATTCCCCTTGAGACAATCAAGGGGGGGAGACATCTCATCTTCTGCCATTCAAAGAAGAAGTGCGACGAGCTCGCCGCGAAACTGGCCG
CGTTGGGCGTTAATGCCGTGGCTTACTACCGCGGCCTTGACGTGTCCGTCATCCCGACCAGTGGCGATGTTGTCGTCGTGGCAACTGATGCAC
TCATGACCGGCTATACCGGCGACTTCGACTCGGTGATAGACTGCAATACGTGTGTCACCCAGACAGTCGACTTCAGCCTTGACCCTACCTTCA
CCATTGAGACAACCACGCTTCCCCAGGATGCTGTCTCCCGCACTCAACGTCGGGGCAGGACTGGCAGGGGGAAGCCAGGCATCTACAGATTTG
TGGCACCGGGGGAGCGCCCTTCCGGCATGTTCGACTCGTCCGTCCTCTGTGAGTGCTATGACGCGGGCTGTGCTTGGTATGAGCTCACACCCG
CTGAGACCACAGTTAGGCTACGAGCGTACATGAACACCCCGGGACTCCCTGTGTGCCAAGACCATCTTGAGTTTTGGGAAGGCGTCTTCACGG
GTCTCACCCATATAGACGCCCACTTCTTATCCCAGACAAAGCAGAGTGGAGAAAACTTTCCTTACCTGGTAGCGTACCAAGCCACCGTGTGCG
CTAGAGCCCAAGCCCCTCCCCCATCGTGGGACCAGATGTGGAAGTGTTTGATCCGTCTCAAGCCCACCCTGCATGGGCCAACACCTCTGCTAT
ACAGACTGGGCGCTGTTCAGAATGAAATCACCCTGACGCACCCGGTCACCAAGTATATCATGACATGCATGTCG

The application's sequence listing, which the Patent Office published only in electronic form, follows.

SEQUENCE LISTING (774 sequences)

SEQ ID NO: 1 - DNA, 4905 bp, Hepatitis C virus
tcgcccacaggacgtcaagttcccgggtggcggtcagatcgttggtggagtttacttgttgccgcgcaggggccctagattgggtgtgcgcgcgacgaggaagacttccgagcggtcgcaacctcgaggtagacgtcagcctatccccaaggcgcgtcggcccgagggcaggtcctgggctcagcccgggtacccttggcccctctatggcaatgagggttgcgggtgggcgggatggctcctgtctccccgtggctctcggcctagctggggccccacagacccccggcgtaggtcgcgcaatttgggtaaggtcatcgatacccttacgtgcggcttcgccgacctcatggggtacataccgctcgtcggcgcccctctcggaggcgctgccagggccctggcgcatggcgtcagggttctggaagacggcgtgaactatgcaacagggaatcttcctggttgctctttctctatcttccttctggctctgctctcttgcctgaccgtgcccgcttcagcctaccaagtgcgcaactcttcggggctttaccatgtcaccaatgattgccctaactcgagtattgtgtacgaggcggccgatgccattctgcacactccggggtgtgtcccttgtgtttacgagggtaacacctcgaggtgttgggtggcggtgacccccacagtggccaccagggacggcaaactccccacgacgcagcttcgacgccacatcgacctgcttgtcgggagtgccaccctctgctcggccctctacgtgggggatctgtgcgggtctgtctttcttgtcggccaactgttcaccttctctcccaggcgccaccggacgatgcagaactgcaattgttctatctaccccggccatataacgggccaccgcatggcatgggatatgatgatgaactggtcccctacggtggcattggcggtagctcagctgctccggatcccacaagccatcatggacatgatcgctggtgctcactggggagtcctggcgggcatagcgtatttctccatggtggggaactgggcgaaggtcctggtagtgctgctgctatttgccggcgtcgacgcggagacccacgtcaccgggggagctgccggccgctccacggctgggattgctggtctcttcagcccaggcgccagacagaacatccaactgatcaataccaacggcagttggcacatcaatagcacggccctgaactgcaacgacagcctcaacaccggctggatagcagggctcttctattccaacaaattcaactcttcgggctgtcccgagaggttggccagctgccgacgccttgccgattttgcccagggctggggccccatcagttacgccaacggaagcggccccgacgaacgcccctactgctggcactaccccccaagaccttgtggtattgtgcccgctaagagcgtgtgtggcccggtgtattgcttcactcccagccccgtggtggtgggaacgaccgacaggtcgggcgcgcctacctacaactggggtgaaaatgacacggacgtcttcgtcctcaacaacaccaggccgccgctgggcaattggttcggttgtacctggatgaactcaagtggattcaccaaagtgtgcggagcgcccccttgtgtcatcggaggggtgggcaacaacaccttgcgctgccccactgattgcttccgcaaacatccggaagccacatactctcggtgcggctccggtccttggatcacacccaggtgcatggtcgactacccatataggctttggcattatccttgtaccatcaactacaccttattcaaagtcaggatgtacgtgggaggggtcgagcacaggctggaagctgcctgcaactggacgcggggcgaacgctgtgatctggaagacagggacaggtccgagctcagtccgttactgctgtccaccacgcagtggcaggtccttccgtgttcttttacgaccctgccagccttgtccaccggcctcatccacctccaccagaacattgtggacgtgcagtacttgtacggggtagggtcaagcatcgcgtcctgggccattaagtgggagtacgtcgttctcctgttccttctgcttgcagacgcgcgcgtctgctcctgcttgtggatgatgttactcatatcccaagcggaggcggctttggagaacctcgtagtactcaatgcagcatccctggccgggacgcacggtcttgtgtccttcctcgtgttcttctgctttgcgtggtatctgaagggtaggtgggcgcccggagcggtctacgccctctacgggatgtggcctctcctcctgctcctgctggcgctgcctcagcgggcatacgcactggacacggaggtggccgcgtcgtgtggcggcgttgttcttgtcgggttgatggcgctgactctgtcaccacattacaagcgcctcatctgctggtgcgtgtggtggcttcagtattttctaaccagagtggaagcgcacctgcacgtgtgggttccccccctcaacgtccggggggggcgcgatgccatcatcttactcatgtgtgttatacacccggctctgatatttgacatcaccaaactgctgctggccgtcttcggacccctttggattcttcaagccagtttgctgaaagtcccctacttcgtgcgcgttcaaggccttctccgaatctgcgcgctagcgcggaagttagccggaggtcattacgtgcagatggccatcatcaagttaggggcgcttactggcacctatgtctataaccatctcactcctctccgagactgggcgcacaacggcctgcaagacctggccgtggctgtagaaccagtcatcttctcccgaatggagaccaaactcatcacgtggggggcagacaccgccgcgtgcggcgacatcatcaacggcttgcccgtctccgcccgcaggggccgggagatattgcttggaccagccgacggaatggcctctaaagggtggaggttgctggcgcccatcacagcgtacgcccagcagacgagaggcctcctagggtgcataatcaccagcctgactggccgggataaaaaccaagtggagggtgaggtccagatcgtgtcaactgctacccaaaccttcctggcaacgtgcatcaatggggtatgctggactgtctaccacggggccggaacgaggaccatcgcatcacccaggggtcctgttatccagatgtacaccaatgtggaccaggaccttgtgggctggcctgctcctcaaggttcccgctcattgacaccctgcacctgcggctcctcggacctttacctggtcacgaggcacgccgatgtcattcccgtgcgccggcgaggtgatagcaggggcagcttgctctcgccccggcccatttcctacttgaaaggctcctcggggggtccgctgttgtgccccgcgggacacgccgtgggcatatttagggccgcggtgtgcacccgtggtgtggctaaggcggtggacttcatccctgtggagaacctagagacaaccatgagatccccggtgttcacggacaactcttctccaccagcagtgccccagagcttccaggtggctcacctgcatgctcccactggcagcggcaagagcaccaaggtcccggctgcgtacgcagctcagggctacaaagtgctagtgctcaacccctctgttgctgcaacattgggctttggtgcttacatgtccaaggctcatggggtcgatcctaatgtcaggacgggggtgcgaacaattaccaccggcagccccatcacgtactccacctacggcaagttccttgccgacggcgggtgctcaggaggtgcttatgacataataatttgtgatgagtgccactccacggatgccacatccatcttgggcatcggcactgtccttgaccaagcagagaccgcgggggcgagactggttgtgctcgccactgctacccctccgggctccgtcaccgtgccccatcctaacatcgaggaggttgctctgtccaccaccggagagatccctttttacggcaaggctattcccctcgaggtcatcaaggggggaaggcatctcatcttctgccactcaaagaaaaagtgtgacgagctcgccgcaaagctggtcgcattgggcatcaatgccgtggcctactaccgcggtcttgacgtgtctgtcatcccgaccagcggcgatgttgtcgtcgtggcgaccgatgctctcatgactggctataccggcgacttcgactctgtgatagactgcaacacgtgtgtcacccagacagtcgatttcagccttgaccctaccttcaccattgagacaaccacgctcccccaagacgctgtctcccggactcaacgtcggggcagaaccggcagggggaagccaggcatctacagatttgtggcaccgggggaacgcccctccggcatgttcgactcgtccgtcatctgtgagtgctatgacgcgggctgtgcttggtatgagctcacgcccgccgagactacagttaggctacgagcgtacatgaacaccccggggctccccgtgtgccaggaccatcttgaattttgggagggcgtctttacgggcctcacccatatagatgcccactttctatcccagacaaagcagagtggagagaacttcccttacctggtagcgtaccaagccaccgtgtgcgctagggctcaagcccctcccccatcgtgggaccagatgtggaagtgtttgatccgcctcaaacccaccctccatgggccaacacccctgctatacagactgggcgctgttcagaatgaagtcaccctgacgcacccagtcaccaaatacatcatgacatgcatgtcggctga

SEQ ID NO: 2 - DNA, 4908 bp, Hepatitis C virus
tcgcccacaggacgtcaagttcccgggtggcggtcagatcgttggtggagtttacttgttaccgcgcaggggccctagattgggtgtgcgcgcgacgaggaagacttccgagcggtcgcaacctcgaggtagacgtcagcctatccccaaggcgcgtcggcccgagggcaggacctgggctcagcccgggtacccttggcccctctatggcaatgagggctgcgggtgggcgggatggctcctgtccccccgtggctctcggcctagctggggccctacagacccccggcgtaggtcgcgcaatttgggtaaggtcatcgataccctcacgtgcggcttcgccgacctcatggggtacattccgctcgtcggcgcgcctcttggaggcgccgccagggccctggcgcatggtgtccgggttctggaggacggcgtgaactatgcaacagggaaccttcctggttgctctttctctatcttccttttggccctgctctcttgcctgactgtacccgcgtcggcctatcaagttcgcaactcctcggggctttatcatgtcaccaatgattgccctaactcgagtattgtgtacgagacggccgacgccattctacactctccggggtgtgtcccttgcgtccgcgagggtaacgcctcgaagtgctgggtgccggtggcccccacagtggccaccaaggacggcaaactccccacgacgcagcttcgacgtcacatcgatctgcttgtcgggagcgccaccctctgctcggccctctatgtgggggacttgtgcgggtctgtcttccttgtcggtcaactgttcactttctcccccagacgccactggacaacgcaagactgcaactgttccatctaccccggccatataacgggccaccgcatggcatgggatatgatgatgaattggtctcctacagcagcgctggtaatggctcaactgctcagagtcccgcaagctgtcatggacatgatcgctggagcccactggggagtcctagcgggcatagcgtatttctccatggtggggaactgggcaaaggtcttgttggtgctgttgttgtttgccggcgtcgacgcgagcactcgcaccatcggggggtctgctgctgcgaccacgtccggattcgccaagctcttcgctgctggctcccgccagaatgtccagctgatcaacaccaacggaagttggcacatcaatcgcacggccttgaactgtaatgcgagtctcgacactggctgggtagcggggctcttctattaccacaaattcaactcttcgggctgccccgagaggatggccagctgtagaccccttgccgatttcgaccagggctggggccctatcagctacgccaacgcaagcggcaccgaccaccccccctactgctggcactaccccccaaagccttgcggtatcgtgccggcacagaacgtatgtggcccagtatattgcttcactcccagccctgtggtggtgggaacgaccgacaagttgggcgtgcccacctacaactggggtagcaatgacacggacgtcttcgtccttaacaacaccaggccaccgttgggcaattggttcggttgcacctggatggactcatatggatataccaaagtgtgcggagcgcccccttgtgtcatcggaggggtaggcaataacaccttgcactgccccactgactgtttccgcaagcatccagaagccacatactctcggtgtggctccggtccctggatcacgcccaggtgcctggtccactactcttacaggctttggcattatccttgtactgtcaactacaccctgttcaaagtcaggatgtacgtgggaggggtcgagcacaggctggaggtcgcttgcaactggacgcggggcgaacgttgcgatctggacgacagggacaggtccgagctcagcccgctgctgctgtccaccacacagtggcaggttcttccgtgttctttcacgaccttgccagccttgactaccggcctcatccacctccaccagaacatcgtggatgtgcaatatttgtacggggtggggtcaagcattgtgtcctgggccatcaagtgggagtacgtcatcctcttgtttctcctgcttgcagacgcgcgcatttgttcctgcttgtggatgatgctactcatatcccaggtggaggcagctttggagaacctcgtgctgctcaacgcggcgtctctgaccggggcgcacggtcttgtgtccttcctcgtgtttttctgctttgcatggtatctgaagggtaggtgggtgcccggagcggcctacgccctctacgggatgtggcctctcctcctgcttctgttggcgttgccccaacgggcatacgcactagacacggaagtggccgcgtcgtgtggtggcgttgttattgtcgggttaatggtgctgactctgtcaccgcactacaagcgctatatcagctggtgcttatggtggctccaatatttcctgactagagtggaagcgcaactgcacgtatgggtcccccccctcaacgtccgaggaggccgcgacgctgtcatcttgctcatgtgtgttatacacccggccttggtatttgacatcaccaagctgctgctggccgtcttcggacccctttggattcttcaaaccagtctgctcaaagtgccctacttcgtgcgcgttcagggccttctccggctctgcgcgctagcgcgcaagatggccggaggccattacgtgcaaatggccatcatcaaggtgggggcgcttactggcacctacatctataaccatcttactcctcttcgggattgggcgcacaacagcctacgagatctggccgtggctgtagagccagtcgtcttttcccagatggagactaagctcatcacctggggggcggacaccgccgcctgcggtgacatcatcaacggcttgcccgtctctgcccgtaggggccgagagatactgctcggaccggccgacggagcggtctccaaggggtggaggttgctagcgcccatcacggcgtatgcccagcagacaaggggccttttgggatgtataattaccagcctgaccggccgggacaaaaaccaggtggagggtgaggttcagattgtgtctactgctgcccagactttcctggcaacctgcatcaacggggtgtgctggactgtctaccacggggccgggacaaggaccatcgcgtcgcccaagggtcccgttatccagatgtataccaatgtagaccaagacctcgtaggctggcccgctccctatggtgctcgctcattgacaccctgcacttgcggctcctcggacctttacctggtcacgaggcacgccgatgtcattcccgtacgccggcggggtgatagcaggggcagcctgctttcgcctcgacccatctcttacttgaaaggctcctcggggggcccactactgtgccccgcgggacacgccgtaggcatattcagggccgcggtgtgcacccgtggagtggctaaggcggtggactttatccccgtagagagcctagagacaaccatgaggtccccggtgttcacagacaactcctccccaccagcggtgccccagagcttccaggtggcccacctgcacgctcccaccggcagcggtaagagcaccaaggtcccggccgcatacgcggctcagggctacaaggtgctggtgctcaacccctccgttgctgcaacactgggctttggcgcctacatgtccaaggcccatgggattgatccgaacatcaggactggggtgaggacaattactactggcagccccatcacgtactccacctacggcaagttcctcgctgacggcgggtgctcagggggtgcttatgacataataatttgtgacgagtgccactccacggatgcaacatccatcttgggcatcggcactgtccttgaccaagcagagacagcgggggcgaggctggttgtgctcgccaccgctacccctccgggctccgtcactgtgccccactctaacatcgaggaggttgctctgtccactaccggagagatccccttttacggcaaggctatcccccttgaggcaatcaagggggggagacatctcattttctgccactcaaggaaaaagtgcgacgagctcgccgcaaggctggtcgcgttgggcatcaatgctgtggcctactaccgcggccttgacgtgtccgtcatcccgaccagcggcgacgttgtcgtcgtggcaactgatgccctcatgaccggcttttccggcgacttcgactcggtgatagactgcaacacgtgtgtcacccagacagtcgacttcagccttgaccctaccttcaccattgagacaaccacgcttcctcaggacgctgtttcccgcacccaacgtcggggcaggactggcagggggaagccaggcatctatagatttgtggcaccgggagagcgcccctccggcatgttcgactcgtccgtcctctgtgagtgctatgacgcaggctgtgcttggtatgagctcacacccgccgagaccacagttaggttacgagcgtacatgaacaccccggggcttcccgtgtgccaggaccatcttgaattttgggagggcgtcttcacaggtctcacccatatagacgcccacttcttatctcagacaaagcagagtggggaaaactttccttacctggtagcgtaccaagccaccgtgtgcgctagagctcaagctccccccccatcgtgggaccagatgtggaagtgcttgatccgcctcaagcccacccttcatgggccaacacctctgctatacagactgggcgctgttcagaatgaaatcaccctgacgcacccgatcaccaagtacatcatgacatgcatgtcggctgacct

SEQ ID NO: 3 - DNA, 4889 bp, Hepatitis C virus
tcgcccacaggacgtcaagttcccgggtggcggtcagatcgttggtggagtttacttgttgccgcgcaggggccctagattgggtgtgcgcgcgacgaggaagacttccgagcggtcgcaacctcgaggtagacgtcagcctatccccaaggcacgtcggcccgagggcaggacctgggctcagcccgggtacccttggcccctctacggcaatgagggctgcggatgggcgggatggctcctgtctccccgtggctctcggcctagttggggccccacagacccccggcgtaggtcgcgcaatttgggtaaggtcatcgatacccttacgtgcggcttcgccgacctcatggggtacataccgctcgtcggcgccccccttggaggcgctgccagggccctggcgcacggcgtccgggttctggaagacggcgtgaactatgcaacagggaatcttcctggttgctctttctctatcttcctcctggccctgctctcttgcttgaccgtgcccgcttcggcctaccaagtgcgcaactccacggggctttatcatgtcaccaacgactgccctaattcgagtattgtgtacgaggcggccgatgctatcctgcacactccggggtgtgtcccttgcgttcgcgagggtaacgtctcgaggtgctgggtggcgatgacccccacggtggccactagggacggcaagctccccacaacgcagcttcgacgccacatcgatctgcttgtcgggagcgccaccctttgctcggccctctacgtgggggacctgtgcgggtctgtctttcttgtcggtcagatgtttactttctctcccaggcgccactggacgacgcaagactgcaattgttccatgtaccccggccatataacgggtcaccgcatggcatgggatatgatgatgaactggtcccctacgacggcgttgatagtagctcagctgctccggatcccacaagccatcttggacatgatcgctggtgctcactggggagtcctggcgggcattgcgtacttttccatggtggggaactgggcgaaggtcctggtagtgctgctgttatttgccggcgtcgacgcgggaacccacgtcagcgggggagccgtcgcccgtggcgcagcttcaattgccgggttgtttaactcaggtgccaaacagaacatccagctgatcaacaccaacggcagttggcacatcaatagcacggccttgaactgcaatgatagccttaacaccggctggatagcagggcttttctactacaacaaattcaactcttcaggctgtcccgacaggttggccagctgccggcgccttaccgattttgcccagggctggggccctatcagtcacgccaacggaagtggccccgacgaacgcccttactgctggcactaccccccaagaccttgtggtattgtgccggcaaagagcgtgtgtggcccagtatattgcttcacccccagccctgtggtggtggggacgaccgacaagtcgggcgcgcctacctacaactggggtgataatgatacggacgttttcgtccttaacaacactaggccaccgctgggcaattggttcggttgtacctggatgaactcaactggattcaccaaagtgtgcggagcgcccccctgtgtcatcggaggggtgggcaataacaccttgcgctgccccactgattgtttccgcaagcatccggaagccacgtactctcggtgcggctctggtccctggattacacccaggtgcctggtcgactatccgtataggctgtggcattatccttgtaccatcaactacaccatcttcaaagtcaggatgtacgtgggaggggtcgagcacaggctggaagctgcctgcaactggacgcggggcgaacgttgtgatctggacgacagggacaggtccgagctcagcccgttgctgctgtccaccacgcagtggcagatccttccgtgttccttcacgaccctgccagccttgtccaccggcctcatccacctccaccagaacattgtggacgtgcagtacttgtacggggtggggtcaagcatcgcgtcctgggccattaaatgggactacgtcgtcctcctcttccttttgcttgcagacgcgcgcgtctgctcctgcttgtggatgatgttactcatatcccaagcggaggcggctttggagaacctcgtagtactcaatgcagcatccctggccgggacacacggtcttgcatccttcctcgtgttcttctgctttgcgtggtatctgaagggtaggtgggtgcccggagcagtctacgccctctacgggatgtggcctctcctcctgctcctgttggcgttgccccagcgggcatacgcactggacacggaggtggccgcgtcgtgtggcggcgttgtccttgtcggggtaatggcgctgactctgtcaccatattacaagcactatatcggctggtgcttgtggtggcttcagtattttctgactagagcagaagcgcaactgcatgtgtgggttccccccctcaacgttcgaggggggcgcgatgccgtcatcttactcatgtgtgttgtacacccgaccttggtatttgacatcaccaagctactgctggccgtcttcggacccctttgggttctgcaagccagcctgcttaaggtgccctacttcgtgcgcgttcaaggccttctccggctctgcgcgctagcgcggaaggtggtcggaggccattacgtgcaaatggtcatcatcaagttgggggcgcttactggcacttatgtctataaccatctcactcctcttcgggactgggcgcacaacggcctccaagatctggccgtggctgtagagccagtcgtcttctcccgaatggaaaccaagctcatcacgtggggggcagacactgccgcgtgcggtgatatcatcaacggcttgcccgtctccgcccgcagggggcaggagatactgctcggaccagccgatggaatggtctccaaggggtggaggttgctggcgcccatcacggcgtacgcccagcagacgaggggcctcctagggtgcataatcaccagcctgactggccgagacaaaaaccaagtggagggtgaagtccagattgtgtcaactgctgcccaaacttttctggcaacgtgcatcaatggggtatgctggactgtctaccatggggctggaacgaggaccattgcatcacccaagggtcctgttatccagatgtataccaatgtggacaaagaccttgtgggctggcccgcccctcaaggttcccgctcattgacaccctgcacctgcggctcctcggacctctacttggtcacgaggcatgccgatgtcattcccgtgcgccggcgaggtgatagcaggggcagcctgctttcgccccggcccatttcctacttgaaaggctcctcggggggtccgctgttgtgccccgcggggcacgccgtgggcatattcagggccgcggtgtgcacccgtggagtggctaaggcggtggacttcatccctgtggagaacctagagacaaccatgaggtccccggtgtttacggacaactcctctccaccagcagtgccccagagcttccaggtggcccacctgcacgctcccaccggcagcggcaagagcaccaaggtcccggctgcatacgcggctcagggctataaagtgctagtgctcaacccctccgttgctgcaacactgggctttggtgcttacatgtccaaggcccatggggtcgagcctaatatcaggaccggggtgagaacaattaccactggcagccccattacgtactccacctatggcaagttccttgccgacggcgggtgttcagggggcgcctatgacataataatttgtgatgagtgccactccacggatgccacatccatcttgggcatcggcactgtcctcgaccaagcagagactgcgggggcgagactggttgtgctcgccaccgctactcctccgggctctgtcactgtgccccatcctaacatcgaggaggttgctctgtccaccaccggagaggtccctttttacggcaaggccatcccccttgaggtaatcaaaggggggagacatctcatcttctgtcactcaaagaagaagtgcgatgagctcgccgcaaagctggtcgcgttgggcgtcaatgccgtggcctactaccgcggtcttgacgtttctgtcatcccaaccagcggcgatgttgtcgtcgtggcgaccgacgctctcatgaccggctttaccggcgacttcgactcggtgatagactgcaacacgtgtgtcactcagacagtcgatttcagccttgaccctaccttcaccattgagacaaccacgctcccccaggatgctgtctcccgtactcaacgtcggggcaggactggcagggggaagccaggcatctacagatttgtggcaccgggagagcgcccctctggcatgttcgactcgtctgtcctctgcgagtgctatgacgcgggctgtgcttggtatgagctgacgcccgccgagactacagttaggctacgagcgtacatgaacaccccggggcttcccgtgtgccaggaccatcttgagttttgggagggcgtctttacgggcctcacccatatagatgcccattttctgtcccagacaaagcagagtggggagaaccttccttacctggtagcgtaccaagccaccgtgtgcgctagggctcaagcccctcccccatcgtgggaccagatgtggaagtgtttgatccgcctcaaacccaccctccacgggccaacacccctgctatacagactgggtgctgttcagaatgaagtcaccctgacgcacccaatcaccaaatacatcatga

SEQ ID NO: 4 - DNA, 4889 bp, Hepatitis C virus
ccgcccacaggacgtcaagttcccgggtggcggtcagatcgttggtggagtttacttgttgccgcgcaggggccctagattgggtgtgcgcgcgacgaggaagacttccgagcggtcgcaacctcgtggtagacgtcagcctatccccaaggcacgtcggcccgagggcaggacctgggctcagcccgggtacccttggcccctctatggcaatgagggctgcgggtgggcgggatggctcctgtctccccgtggctctcggcctagttggggccccacagacccccggcgtaggtcgcgcaatttgggtaaggtcatcgatacccttacgtgcggcttcgccgacctcatggggtacataccgctcgtcggcgcccctcttggaggcgctgccagggccctggcgcacggcgtccgggttctggaagacggcgtgaactatgcaacagggaaccttcctggttgctctttctctatcttcctcctagccctgctctcttgcttgaccgtgcccgcttcggcctaccaagtgcgcaactccacggggctttatcatgtcaccaacgactgccctaattcgagtattgtgtacgaggcggccgatgctatcctgcacactccggggtgtgtcccttgcgttcgcgagggtaacgtctcgaggtgctgggtggcgatgacccccacggtggccactagggacggcaagctccccacaacgcagcttcgacgccacatcgatctgcttgtcgggagcgccaccctttgctcggccctctacgtgggggacctgtgcgggtctgtctttcttgtcggtcagatgtttactttctctcccaggcgccactggacaacgcaagactgcaattgttccatgtaccccggccatataacgggtcaccgcatggcatgggatatgatgatgaactggtcccctacgacggcattgatagtggctcagctgctccggatcccacaagccatcttggacatgatcgctggtgctcactggggagtcctggcgggcattgcgtatttctccatggtggggaactgggcgaaggtcctggtagtgctgctgttatttgccggcgtcgacgcgggaacccacgtcagcgggggatccatcgcccgtggcgcagcttcaattgccgggttgtttaaccaaggtgccagacagaacatccagctgatcaacaccaacggcagttggcacatcaatagcacggccttgaattgcaatgatagccttaacaccggctggatagcagggcttttctattacaacaaattcaactcttcaggctgtcccgagaggttggccagctgccggcgccttaccgattttgcccagggctggggccctatcagttatgccaacggaagtggccccgacgaacgcccttactgctggcactaccctccaagaccttgtggtattgtgccggcaaagagcgtgtgtggcccagtatattgcttcacccccagccctgtggtggtggggacgaccgacaagtcgggcgcgcctacctacaactggggtgataatgatacggacgttttcgtccttaacaacactaggccaccgctgggcaattggttcggttgtacctggatgaactcaactggattcaccaaagtgtgcggagcgcccccctgtgtcatcggaggggtgggcaataacaccttgcgctgccccactgattgtttccgcaagcatccggaagccacgtactctcggtgcggctctggtccctggattacacccaggtgcctggtcgactatccgtataggctgtggcattatccttgtaccatcaactacaccatcttcaaagtcaggatgtacgtgggaggggtcgagcacaggctggaagctgcctgcaattggacgcggggcgaacgttgtgatctggacgacagggacaggtccgagctcagcccgttgctgctgtccaccacgcagtggcaggtccttccgtgttccttcacgaccctgccagccttgtccaccggcctcatccacctccaccagaacattgtggacgtgcagtacttgtacggggtggggtcaagcatcgcgtcctgggccattaagtgggactacgtcgtcctcctgttccttttgcttgcagacgcgcgcgtctgctcctgcttgtggatgatgttactcatatcccaagcggaggcggctttggagaacctcgtagtactcaatgcagcatccctggccgggacacacggtcttgcatccttcctcgtgttcttctgctttgcatggtatctgaagggtaggtgggtgcccggagcagtctacgccctctacgggatgtggcctctcctcctgctcctgttggcgttgccccagcgggcatacgcactggacacggaggtggccgcgtcgtgtggcggcgttgtccttgtcggggtaatggcgctgactctgtcaccatattataagcactatatcagctggtgcttgtggtggcttcagtattttctgactagagcagaagcgcaactgcatgtgtgggttccccccctcaacgttcgaggggggcgcgacgccgtcatcttactcatgtgtgctgtacacccgaccttggtatttgacatcaccaagctactgctggccgtcctcggacccctttgggttctgcaagccagtctgcttaaggtgccctacttcgtgcgcgttcaaggccttctccggctctgcgcgttagcgcggaaggtggtcggaggccattacgtgcaaatggtcatcatcaagttgggggcgcttactggcacttatgtctataaccatctcactcctcttcgggactgggcgcacaacggccttcaagatctggccgtggctgtagagccagtcgtcttctcccgaatggaaaccaagctcatcacgtggggggcagacactgccgcgtgcggtgatatcatcaacggcttgcccgtctccgcccgcagggggcaggagatactgctcggaccagccgacggaatggtctccaaggggtggaggttgctggcgcccatcacggcgtacgcccagcagacgaggggcctcctagggtgcataatcaccagcctgactggccgagacaaaaaccaagtggagggtgaagtccagattgtgtcaactgctgcccaaactttcctggcaacgtgcatcaatggggtatgctggactgtctaccatggggctggaacgaggaccattgcatcacccaagggtcctgttatccagatgtataccaatgtggacaaggacctcgtgggctggcccgcccctcagggttcccgctcattgacaccctgcacctgcggctcctcggacctttacttggtcacgaggcatgccgatgtcattcccgtgcgccggcgaggtgatagcaggggcagcctgctttcgccccggcccatttcctacttgaaaggctcctcggggggtccgctgttgtgccccgcgggacacgccgtaggcatattcagggccgcggtgtgcacccgtggagtggctaaggcggtggactttatccctgtagagaacctagagacaaccatgaggtccccggtgtttacggacaactcctctccaccagcagtgccccagagcttccaggtggcccacctgcacgctcccaccggcagcggcaagagcaccaaggtcccggctgcatacgcggctcagggctataaagtgctagtgctcaacccctccgttgctgcaacactgggctttggtgcttacatgtccaaggcccatggggtcgagcctaatatcaggaccggggtgagaacaattaccactggcagccccattacgtactccacctacggcaagttccttgccgacggcgggtgttcagggggtgcttatgacataataatttgtgatgagtgccactccacggatgccacatccatcttgggcatcggcactgtcctcgaccaagcagagactgcgggggcgagactggttgtgctcgccaccgctactcctccgggctctgtcactgtgccccatcctaacatcgaggaggttgctctgtccaccaccggagaggtccctttttacggcaaggccatcccccttgaagtaatcaaaggggggagacacctcatcttctgtcactcaaagaagaagtgcgacgagctcgccgcaaagctggttgcgttgggcgtcaatgccgtggcctactaccgcggtcttgacgtttctgtcatcccgaccagcggcgatgttgtcgtcgtggcaaccgacgctctcatgaccggctttaccggcgacttcgactcggtgatagactgtaacacgtgtgtcacccagacagtcgatttcagccttgaccctaccttcaccattgagacaaccacgctcccccaggatgctgtctcccgtactcaacgtcggggcaggactggcagggggaagccaggcatctacagatttgtggcaccgggagagcgcccctccggcatgttcgactcgtccgtcctctgtgagtgctatgacgcgggctgtgcttggtatgagctgacgcccgccgagactacagttaggctacgagcgtacatgaacaccccggggcttcccgtgtgccaggaccatcttgagttttgggagggcgtctttacgggcctcacccatatagatgcccattttctgtcccagacaaagcagagtggggagaaccttccttacctggtagcgtaccaagccaccgtgtgcgctagggctcaagcccctcccccatcgtgggaccagatgtggaagtgtttaatccgcctcaaacccaccctccacgggccaacacccctgctatacagactgggtgctgttcagaatgaaatcaccctgacacacccaatcaccaaatacatcatga

SEQ ID NO: 5 - DNA, 4889 bp, Hepatitis C virus
tcgcccacaggacgttaagttcccgggtggcggtcagatcgttggtggagtttacttgttgccgcgcaggggccctagaatgggtgtgcgcgcgccgaggaagacttccgagcggtcgcaacctcgaggtagacgtcagcctatccccaaggcacgtcggcccgagggcaggacctgggctcagcccgggtacccttggcccctctatggcaatgagggctgcgggtgggcgggatggctcctgtccccccgcggctctcggcctagttggggccccacagacccccggcgtaggtcgcgcaatttgggtaaggtcatcgacacccttacgtgcggcttcgccgacctcatggggtacataccgctcgtcggcgcccctcttggaggcgctgccagggccctggcgcatggcgttcgggttctggaagacggcgtgaactatgcaacagggaaccttcctggttgctctttctctatcttctttctggccctgctctcttgtctgactgtgcccgcttcggcctaccaagtgcgcaactctacagggctctaccacgtcaccaatgattgccctaactcgagtattgtgtacgaggcgcctgatgccatcctgcacactccggggtgtgtcccttgcgttcgcgagggtaacgcctcgaggtgttgggtggcgatgacccccacggtggccaccagggacggcaaactccccgcgacgcagcttcgacgtcacatcgatctgcttgtcgggagcgccaccctctgttcggctctttacgtgggggacctgtgcgggtctgtctttcttgtgggtcaactgtttaccttctcccccaggcgccactggacgacgcaagactgcaattgctctatctatcccggccatataacgggtcaccgcatggcatgggatatgatgatgaactggtccccgacgacggcgttggtaatggctcagctgctccggatcccgcaagccatcttggacatgatcgctggtgcccactggggagtcttggcgggcatagcgtatttctccatggtggggaactgggcgaaggtcctggtagtgctgctgctattcgccggcgtcgacgcggaaaccatgaccaccgggggggccgccgctcgcaacgtgtatagaatttccagcttcttctcgccgggcccccagcagaacatccagctgatcaacaccaacggcagttggcacatcaataggacggccttgaactgcaacgacagccttaacaccggctggttagcagggcttttctatcatcgcagcttcaactcttcaggctgtcctgcgaggctggccagctgccgacgccttaccgactttgcccagggctggggccctatcagccatgccaacggcagcggccccgaccaacgcccctactgttggcactaccccccaaaaccttgcggtattgtgcccgcacggaacgtgtgtggcccggtatattgcttcacccccagtcccgtggcggtgggaacgaccgacagggcgggcgtccctacctaccgctggggtgaaaatgaaacggacgtcttcgtccttaacaacaccaggccaccgctgggcaattggttcggttgtacctggatgaattcaactggattcaccaaagtgtgcggagcgcctccttgtgtcatcggaggagtgggcaacgacaccttgtactgccccactgattgtttccgcaagcatccggaagccacatattcccggtgcggctccggtccctggattacacccagatgcctggttgactacccgtataggctttggcattatccttgtaccgtcaactacaccatattcaaagtcaggatgtatgtgggaggggtcgagcataggctggatgctgcctgcaactggacgcggggcgaacgttgcgatctggaagacagggacaggtccgagctcagcccgttgctgctgtccactacacagtggcaggtccttccgtgctccttcacgaccttgccagccttgtccaccggcctcatccacctccaccagaacattgtggacgtgcagtacctgtacggggtagggtcaagcatcgcgtcctgggccattaagtgggagtacgtcgttctcctgttccttctgcttgcagacgcgcgcgtctgctcctgcctgtggatgatgctactcatatcccaagcggaggcggctttggagaacctcgtaatactcaatgcagcatccctggccgggacgcaaggtcttgtatccttcctcgtgttcttctgctttgcgtggtatctgaagggtaggtgggtgccaggagcggtttacgccctctacggaatgtggcctctcctcctgctcctgttggcgttgccccagcgggcatacgcgctggacacggaggtggccgcgtcgtgtggcggcgttgttcttgtcgggttgatgatgctgactctgtcaccgtattacaagcgctatatcagctggtgcttatggtggcttcagtattttctgactagggcagaagcgcaactgcacgtgtgggttccccccctcaacgttcgaggggggcgcgacgctgccatcttactcacatgcgttgtacacccgactctggtatttgacatcaccaaactactgctggctgtcctcggacccctttggattcttcaagccagtttgcttaaagtaccctacttcgtgcgcgtccaaggccttctccggatctgcgcgttagcgcggaagatggtcggaggccactacgtgcaaatggttatcatcaagttagggatgcttactggcacctatgtttataaccatctcacccccctccgggactgggcgcacaacggcctgcgagatctggccgtggctgtagaaccagtcgtcttctcccaaatggagaccaagctcatcacgtggggggcagacactgccgcgtgcggtgacatcatcaacggcttgcccgtctccgcccgtaggggccaggagatactgctcggaccagccgatggaatggtctccaaggggtggaggttgctggcgcccatcacggcgtacgcccagcagacaaggggcctcctagggtgcataatcaccagcctaaccggccgggataaaaaccaagtggagggtgaggtccagattgtgtcaactgctgcccaaactttcctggcaacgtgcatcagtggggtatgctggactgtctaccacggggccggaacgaggactattgcatcatccaaaggccctgttatccagatgtataccaatgtggacaaagaccttgtgggctggcccgctcctcaaggtgcccgctcattgacaccctgcacctgcggctcctcggacctttacctggtcacgaggcatgccgatgtcatccccgtgcgccggcggggtgatagcaggggcagcctgctctcgccccggcccatttcctatctgaaaggctcctcggggggcccgctgttgtgccccgcgggacacgccgtaggcatattcagggccgcggtgtgcacccgtggagtggctaaggcggtggactttatccctgtggagaacctagagacaaccatgaggtccccggtgttcacggacaactcctctccgccagcagtgccccagagcttccaggtggcccacctgcatgctcccacaggcagcggcaagagcaccaaggtcccggctgcgtatgcggctcagggctataaggtgctagtactcaacccctctgtcgctgcaacactgggctttggtgcttatatgtccaaggcccatgggatcgatcctaatatcaggaccggggcgagaacaattaccactggcagccccatcacgtactccacctacggcaaatttcttgccgacggcgggtgctcggggggcgcttatgatataataatttgtgacgagtgccattccacggatgccacatccatcttgggcatcggcactgtccttgaccaggcagagaccgcgggggcgagactggttgtgctcgccaccgccacccctccgggctccgtcactgtgccccatcctaacatcgaggaggttgctctgtccaccaccggagagattcctttctatggcaaggctatccccctcgaagtaatcaaaggggggagacatctcattttttgtcactcaaagaagaagtgcgacgagctcgccgcaaagctagtcgcattgggcatcaatgccgtggcctactaccgcggtcttgacgtgtccgtcatcccgaccagcggcgatgttgtcgtcgtggcaactgatgctctcatgaccggctttaccggcgacttcgactcggtgatagactgcaacacgtgtgtcacccagacggtcgacttcagccttgaccctactttcaccattgagacaaccacgcttccccaggatgctgtctcccgcactcaacgtcggggtaggactggcagggggaagccaggcatctacagatttgtggcaccgggggagcgcccctccggcatgttcgactcgtccatcctctgtgagtgctatgacgcgggctgtgcttggtatgagctcacgcccgccgagactacagttagactacgagcgtacatgaacaccccggggcttcccgtgtgccaagaccatcttgaattttgggagggcgtcttcacaggcctcactcatatagatgcccacttcctatcccaaacaaagcagagtggggagaatcttccttacctggtagcgtaccaagccaccgtgtgcgctagggctcaagcccctcccccatcgtgggaccagatgtggaagtgtttgatccgcctcaaacccaccctccatgggccaacacctctgctatacagactgggcgctgtccagaatgaggtcaccctgacgcacccagtcaccaaatacattatga

SEQ ID NO: 6 - DNA, 4889 bp, Hepatitis C virus
tcgcccacaggacgttaagttcccgggtggcggtcagatcgttggtggagtttacttgttgccgcgcaggggccctagaatgggtgtgcgcgcgccgaggaagacttccgagcggtcgcaacctcgaggtagacgtcagcctatccccaaggcacgtcggcccgagggtaggacctgggctcagcccgggtacccttggcccctctatggcaatgagggctgcgggtgggcgggatggctcctgtctccccgcggctctcggcctagttggggccccacagacccccggcgtaggtcgcgcaatttgggtaaggtcatcgatacccttacgtgcggcttcgccgacctcatggggtacataccgctcgtcggcgcccctcttggaggcgctgccagggccctggcgcatggcgtccgggttctggaagacggcgtgaactatgcaacggggaaccttcccggttgctctttctctatcttccttctggccctgctctcttgtctgactgtgcccgcttcggcctaccaagtgcgcaactccacggggctttaccacgtcaccaatgattgccccaactcgagtattgtgtacgaggcgcctgatgccatcctgcacactccggggtgtgtcccttgcgttcgcgagggtaacgcctcgaggtgttgggtggcgatgacccccacggtggccaccagggacggcaaactccctgcaacgcagctccgacgtcacatcgatctgcttgtcgggagtgccaccctctgttcggccctctacgtgggggacctgtgcgggtctgtctttcttgttggtcaactgtttaccttctctcccaggcgccactggacgacgcaagactgcaattgttctatctatcccggccatataacgggccaccgcatggcatgggatatgatgatgaactggtccccgacgacggcgttggtaatggctcagctgctccggatcccgcaagccatcttggatatgatcgctggtgcccactggggagtcctggcgggcatagcgtatttctccatggtggggaactgggcgaaggtcctggtagtgctgctgctatttgccggcgtcgatgcgggaaccgtcgtcaccggaggggtcgccgcccgcaccgcgtatggatttactagtctcttcacgcgaggcgcccagcagaacatccagctgatcaacaccaacggcagttggcacatcaataggacggccttgaactgcaacgacagccttaacaccggctggttagcagggcttttctatcggaacaacttcaactcttcaggctgtcctcagaggttggccagctgccggcgccttgccgattttgcccagggctggggccctatcagccatgccaacggcagcggccccgaccaccgcccctactgctggcactaccccccaaaaccttgcggcattgtgcccgcacagaacgtgtgtggcccggtatattgcttcactcccagccccgtggcggtgggaacgaccgacagggcgggcatccctacctacagctggggtgaaaatgatacggacgtcttcgtccttaacaacaccaggccaccgctgggcaattggtttggttgcacctggatgaactcaactggattcaccaaagtgtgtggagcgcccccttgtgtcatcggaggggtgggcaacaacaccttgcactgccccactgattgtttccgcaagcatccggaagccacatactcccggtgcggctccggtccctggattacacccagatgcctggtcgactacccgtataggctttggcattatccttgtaccatcaactataccatattcaaagtcaggatgtatgtgggaggggtcgagcataggctggatgctgcctgcaactggacgcggggcgaacgttgcgatctggaagacagggacaggtccgagctcagcccgttgctgctgtccactacacagtggcaggtccttccgtgttccttcacgaccttgccagccttgtccaccggtctcatccacctccaccagaacatcgtggacgtgcagtacctgtacggggtggggtcaagcatcgcgtcctgggccatcaagtgggagtacgtcgttctcctgttccttctgcttgcagacgcgcgcgtctgctcctgcctgtggatgatgctactcatatcccaagcggaggcggctttggagaacctcgtaatactcaatgcagcatccctggccgggacgcaaggtcttgtatccttcctcgtgttcttctgctttgcatggtatctgaagggtaggtgggtgccaggagcggtttacgccctctacggaatgtggcctctcctcctgctcctgctggcgttgccccagcgggcatacgcgctggacacggaggtggccgcgtcgtgtggcggcgttgttctcgtcgggttgatggcgctgactctgtcaccgtattacaagcgctacatcagctggtgcttatggtggctccagtattttctgactagagcagaagcgcaactgcacgtgtgggttccccccctcaacgttcgaggggggcgcgacgccgtcatcttactcatgtgtgttgtacacccgactttggtatttgacatcaccaaactactgctggccgtcctcggacccctttggattcttcaagccagtttgcttaaagtaccctacttcgtgcgcgtccaaggccttctccggatctgcgcgttagcgcggaagatggtcgggggccaatacgtgcaaatggttatcatcaagttagggacgcttactggcacctatgtttacaaccatctcactcctcttcgggactgggcgcacaacggcctgcgagatctggccgtggctgtagagccagtcgtcttctcccaaatggagaccaagctcatcacgtggggggcagacactgccgcgtgcggtgacatcatcaacggtctgcccgtctccgcccgtaggggtcgggagatactgctcggaccagccgatggaatggtctccaaggggtggaggttgctggcgcccatcacggcgtacgcccagcagacaaggggcctcctagggtgcataatcaccagcctaaccggccgggacaaaaaccaagtggagggtgaggtccagattgtgtcaactgctgcccaaactttcctggcaacgtgcatcagtggggtatgctggactgtctaccacggggccggaacgaggactattgcatcatccaaaggccccgttatccagatgtataccaatgtggacaaagaccttgtgggctggcccgctcctcaaggtgcccgctcattgacaccctgcacctgcggctcctcggacctttacctggtcacgaggcatgccgatgtcatccccgtgcgccggcggggtgatagcaggggcagcctgctctcgccccggcccatttcctacttgaaaggctcctcggggggcccgctgttgtgccccgcgggacacgccgtaggcatattcagggccgcggtgtgcacccgtggagtggctaaggcggtggactttatccctgtggagaacctagagacaaccatgaggtccccggtgttcacggacaactcctctccgccagcagtgccccagagcttccaggtggcccacctgcatgctcccacaggcagcggcaagagcaccaaggtcccggctgcatacgcggctcagggctataaggtgctagtgctcaacccttctgttgctgcaacattgggctttggtgcttacatgtccaaggcccacgggatcgatcctaatatcaggaccggggcgagaacaattactactggcagccccatcacgtactccacctacggtaagttccttgccgacggcgggtgctcggggggcgcttatgatataataatttgtgacgagtgccactccacggatgccacatccatcttgggcatcggcactgtccttgaccaggcagagaccgcgggggcgagactggttgtgctcgccaccgccacccctccgggctccgtcactgtgccccaccccaacattgaggaggttgctctgtccaccaccggagagattcctttctatggcaaggctatccccctcgaagtaatcaaaggggggagacatctcattttttgtcactcaaagaagaagtgcgacgagctcgccgcaaagctggtcgcattgggcatcaatgccgtggcctactaccgcggtcttgatgtgtctgtcatcccgaccagcggcgatgttgtcgtcgtggcaactgatgctctcatgaccggctttaccggcgacttcgactcggtgatagactgcaacacgtgtgtcacccagacggtcgatttcagccttgaccctaccttcaccattgagacaaccacgcttccccaagacgctgtctcccgcactcaacgtcggggcaggactggcagggggaagccaggcatctacagatttgtggcaccgggggagcgcccttccggcatgttcgactcgtccgtcctctgtgagtgctatgacgcgggctgtgcttggtatgagctcacgcccgccgagactacagttagactacgagcgtacatgaacaccccggggcttcccgtgtgccaagaccatctcgaattttgggagggcgtcttcacaggcctcactcatatagatgcccacttcctatcccagacaaagcagagtggggagaatcttccttacctggtagcgtaccaagccaccgtgtgcgctagggctcaagcccctcccccatcgtgggaccagatgtggaagtgtttgatccgcctcaaacccaccctccatgggccaacacctctgctatacagactgggcgctgtccagaatgaggtcaccttgacgcacccagtcactaaatacatcatga

SEQ ID NO: 7 - DNA, 4889 bp, Hepatitis C virus
tcgcccacaggacgttaagttcccgggtggcggtcagatcgttggtggagtttacttgttgccgcgcaggggccctagaatgggtgtgcgcgcgccgaggaagacttccgagcggtcgcaacctcgaggtagacgtcagcctatccccaaggcacgtcggcccgagggcaggacctgggctcagcccgggtacccttggcccctctatggcaatgagggctgcgggtgggcgggatggctcctgtctccccgcggctctcggcctagttggggccccacagacccccggcgtaggtcgcgcaatttgggtaaggtcatcgatacccttacgtgcggcttcgccgacctcatggggtacataccgctcgtcggcgcccctcttggaggcgctgccagggccctggcgcatggcgtccgggtcctggaagacggcgtgaactatgcaacagggaaccttcctggttgctctttctctatcttccttctggccctgctctcttgtctgactgtgcccgcttcggcctaccaagtgcgcaactccacggggctctatcacgtcaccaatgattgccctaactcgagtattgtgtacgaggcgcctgatgccatcctgcacactccggggtgtgtcccttgcgttcgcgagggtaatgcctcgaggtgttgggtggcgatgacccccacggtggccaccagggacggcaaactccctgcgacgcagctccgacgtcacatcgatctgcttgtcgggagcgccaccctctgttcggccctctacgtgggggacctgtgcgggtctgtctttcttgttggtcaactgtttaccttctctcccaggcgccactggacgacgcaagactgcaattgttctatctatcccggccatataacgggccaccgcatggcatgggatatgatgatgaactggtccccgacgacagcgttggtaatggctcagctgctccggatcccgcaagccatcttggacatgatcgctggtgctcactggggagtcctggcgggcatagcgtatttctccatggtggggaactgggcgaaggtcctggtagtgctgttgctattcgccggcgtcgatgcggaaaccgtcgtcaccggggggaccgccgcccgcaacgcgtacggactctctagtctcttcatgcggggccccaagcagaacatccagctgatcaacaccaacggcagttggcacatcaataggacggccttgaactgcaacgatagccttaacaccggctggctagcagggcttttctatcagcacaacttcaactcttcaggctgtcctgagaggctggccagctgccgacgccttgccgattttgcccagggctggggccctatcagccatgccaacggcagcggccccgaccaccgcccctactgctggcactaccccccaaaaccttgcggtattgtgcccgcacagaacgtgtgtggtccggtatattgcttcactcccagccccgtggcggtgggaacgaccgacaggtcgggcgtccctacctaccgctggggtgaaaatgagacggacgtcttcgtccttaacaacaccaggccaccgctgggcaattggtttggttgtacctggatgaactcaactggattcaccaaagtgtgcggagcgcctccttgtgtcatcggaggggcgggcaacaacaccttgcactgccccaccgattgtttccgcaagcatccggaagccacatactcccggtgcggctccggtccctggattacacccagatgcatggtcgactacccgtataggctttggcattatccttgtaccatcaactataccatatttaaagtcaggatgtacgtgggaggggtcgagcataggctggatgttgcctgcaactggacgcggggcgaacgctgcgatctggaagacagggacaggtccgagctcagcccgttgctgctgtccaccacacagtggcaggtccttccgtgttccttcacgaccttgccggccttgtccaccggcctcatccacctccaccagaacatcgtggacgtacagtacctgtacggggtggggtcaagcattgcgtcctgggccattaagtgggagtacgtcgttctcctgttccttctgcttgcagacgcgcgcgtctgctcctgcctgtggatgatgctactcatatcccaagcggaggcggctttggagaacctcgtaacactcaatgcagcatccctggccgggacgcaaggtcttgtatccttcctcgtgttcttctgtttcgcgtggtatctgaagggtaggtgggtgccaggagcggtttacgccctctacgggatgtggcctctcctcctgctcctgttggcgttgccccagcgggcatacgcgctggacacggaggtggccgcgtcgtgtggcggcgttgttctcgtcgggttgatggcgctgactctgtcaccgtattacaagcgctacatcagctggtgcttatggtggctccagtattttctgactagagcagaagcgcaactgcacgtatgggttccccccctcaacgctcgaggggggcgcgacgctgtcatcttactcatgtgtgttgtacacccgactttggtatttgacatcaccaaactactgctggccgtcctcggacccctttggattcttcaagccagtctgcttaaagtaccctactttgtgcgcgtccagggccttctccggatctgcgcgttagcgcggaagatggttgggggccactacgtgcaaatggttatcatcaagctagggacgcttactggcacctatgtttacaaccatctcactcctcttcgggactgggcgcacaacggcctgcgagatctggccgtggctgtagagccagtcgtcttctcccaaatggagaccaagctcatcacatggggggcagacactgccgcgtgcggtgacatcatcaacggcttgcccgtctccgcccgtaggggccgggagatactgctcggaccagccgatggaatggtctccaaggggtggaggttgctggcgcccatcacggcgtacgcccagcagacaaggggcctcttaggatgcataatcaccagcctgaccggccgggacaaaaaccaagtggagggtgaagtccagattgtgtcaactgctgcccaaactttcctcgcaacgtgcatcagtggggtatgctggactgtctaccacggggccggaacgaggactattgcatcatccaaaggccctgttatccagatgtataccaatgtggacaaagaccttgtgggctggcccgcccctcaaggtgcccgctcattgacgccctgcacctgcggctcctcggacctttacctggtcacgaggcatgccgatgtcatccccgtgcgccggcggggtgatagcaggggcagcctgctttcgccccggcccatttcctatttgaaaggttcctcggggggcccgctgttgtgccccgcgggacacgccgtaggcatattcagggccgcggtgtgcacccgtggagtggctaaggcggtggactttatccccgtggagaacctagagacaaccatgaggtccccggtgtttacggacaactcctctccgccagcagtgccccagagcttccaggtggcccacctgcatgctcccacgggcagcggcaagagcaccaaggtcccagctgcatatgcggctcagggctataaagtgctagtgctcaacccctctgttgctgcaacactgggctttggtgcttatatgtccaaggcccacgggattgatcctaacatcaggaccggggcgagaacaattaccactggcagccccatcacgtactccacctacggcaagttccttgccgacggcgggtgctcggggggcgcctatgatataataatttgtgacgagtgccactccacggatgccacatccatcttgggcatcggcactgtccttgaccaggcagagaccgcgggggcgagactagttgtgctcgccaccgccacccctccgggctccatcactgtgccccatcctaacatcgaggaggttgctctgtccaccaccggagagattcctttctatggcaaggctatccccctcgaagtaatcaaaggggggagacatctcattttttgtcactcaaagaagaagtgcgatgagctcgccgcaaagctggtcgcattgggcatcaatgccgtggcctactaccgcggtcttgacgtgtccgtcatcccgaccagcggcgatgttgtcgtcgtggcaactgatgctctcatgaccggttttaccggcgacttcgactcggtgatagactgcaacacgtgtgtcacccagacggtcgatttcagccttgaccctaccttcaccattgagacaaccacgcttccccaagatgctgtctcccgcactcagcgtcggggcaggactggcagggggaagccaggcatctacaggtttgtggcaccaggggagcgcccttccggcatgttcgactcgtccatcctctgtgagtgctatgacgcgggttgtgcttggtatgagctcacacccgccgagactacagttagactacgagcgtacatgaacaccccggggcttcccgtgtgccaagaccatctcgaattttgggagggggtcttcacaggcctcactcatatagatgcccacttcctatcccagacaaagcagagtggggagaatcttccttacctggtagcgtaccaagccaccgtgtgcgctagggctcaagcccctcccccatcgtgggaccagatgtggaagtgtttgatccgcctcaaacccacccttcatgggccaacacctctgctatacagactgggtgctgtccagaatgaggtcaccctgacgcacccagtcaccaaatatatcatga

SEQ ID NO: 8 - DNA, 5260 bp, Hepatitis C virus
tcactcccctgtgaggaactactgtcttcacgcagaaagcgtctagccatggcgttagtatgagtgtcgtgcagcctccaggaccccccctcccgggagagccatagtggtctgcggaaccggtgagtacaccggaattgccaggacgaccgggtcctttcttggataaacccgctcaatgcctggagatttgggcgtgcccccgcaagactgctagccgagtagtgttgggtcgcgaaaggccttgtggtactgcctgatagggtgcttgcgagtgccccgggaggtctcgtagaccgtgcaccatgagcacgaatcctaaacctcaaagaaaaaccaaacgtaacaccaaccgtcgcccacaggacgtcaagttcccgggtggcggtcagatcgttggtggagtttacttgttgccgcgcaggggccctagattgggtgtgcgcgcgacgaggaagacttccgagcggtcgcaacctcgaggtagacgtcagcctatccccaaggcacgtcggcccgagggcaggacctgggctcagcccgggtacccctggcccctctatggcaatgagggctgcgggtgggcgggatggctcctgtctccccgtggctctcggcctaactggggccccacagacccccggcgtaggtcgcgtaatttgggtaaggtcatcgatacccttacatgcggcttcgccgacctcatggggtacataccgctcgtcggcgcccctcttgggggcgctgccagggccctggcgcatggcgtccgggttctggaagacggcgtgaactatgcaacagggaaccttcctggttgctctttctctatcttccttctggctttgctctcttgcctgactgtgcctgcttcagcctaccaagtgcgcaactccacggggctttatcatgtcaccaatgattgccctaactcgagtattgtgtacgaggcggacgatgctatcctgcacactccggggtgtgtcccttgcgtccgcgagggtaacggctcgaggtgttgggtggcgataacccccacggtggccaccagggacggcaaactccccacagtgcagcttcgacgtcacatcgatctgctcgtcgggagcgctaccctttgttcggccctttacgtgggggacctgtgcgggtctgtctttcttgtcggccaactgttcaccttctctcccaggcgccactggacaacgcaggactgcaattgttccatctatcccggccatataacgggtcaccgtatggcatgggacatgatgatgaactggtcccctacgacggcgctggtagtagctcagatgctccggatcccacaagccatcctggacatgatcgctggtgctcactggggagtcctggcgggcatagcgtatttctccatggtggggaactgggcgaaggtcctggtagtgctgctgctatttgccggcgtcgacgcgggaacccacgtcaccgggggcattgccgcccgtaccacgtctagaattgctggtctcttcaacccaggcgcccagcaggacatccagctggttaacaccaacggcagttggcacatcaacagaacggccttgaactgtaacgatagccttcacaccggctggatagcggggcttttctatcgctacaaattcaactcttcaggctgtcccgagaggttggccagctgccgaccccttaccgattttgcccagggctggggccctattagttacgccaacggaagcggccccgaccaacgcccctactgctggcactatcccccaaagccttgcggcattgtgcccgcacagagcgtgtgtggcccggtgtattgcttcactcccagccccgtggtggtgggaacgaccgacaaggcgggcgcgcctacctacagatggggtgcaaacgatacggacgtcttcgtccttaacaacaccaggccaccactgggcaattggttcggttgcacctggatgaactcaactggatacaccaaagtgtgcggggcgcccccctgcgtcatcggaggggtgggcaacaagaccttgcactgccccaccgattgtttccgcaagcatccggaagccacatactctcggtgcggctccggtccctggattacacccaggtgtctggtcgactatccgtataggctttggcattacccttgtaccatcaactacaccgtgttcaaagtcaggatgtacgtgggaggggtcgagcataggctggaggctgcctgcaactggacgcggggcgaacgttgcaatctggaagacagggacaggtccgagctcagcccgttgctgctgtccaccacacagtggcaagtccttccgtgttccttcacgaccctgccagccttgtccaccggcctcatccacctccaccagaacattgtggacgtgcagtacttatacggggtggggtcaagcatcgcgtcctgggccatcaagtgggagtacgtcgttctcctattccttctgctcgcagacgcgcgcgtctgctcctgcttgtggatgatgttactcatatcccaagcggaggcggctttggagaacctcgtagtgctcaatgcagcatctttggccgggacacacggtcttgtgtccctcctcgtgttcttctgctttgcgtggtacctgaagggtaggtgggtgcccggagcggtctacgccctctacgggatgtggcctctcctcctgctcctattggcgttgccccagcgggcatatgcgttggacacggaggtggccgcgtcgtgtggcggcgctgttcttgtcgggttgatggcgctgactctgtcaccatattacaagcgctatgtcagctggtgcttatggtggcttcagtactttctgaccagagcagaagcgcaactgcacgtgtgggttccccctctcgacgtccgaggggggcgcgacgccgtcatcttactcatgtgtgctgtacgcccggctttggtgtttgacatcaccaagctgctgctggccgtcctcggacccctctggattctccaagccagtttgcttaaagtgccctactttgtgcgcgttcaaggccttctccggatctgcgcgctagcgcggaagatggcggggggtcattacgtgcaaatggtcatcatcaagttgggggcgctcactggcacttatgtgtataaccatctcactcctcttcgggactgggcgcacaacggcctgcgagatctggctgtggctgtagagccagtcgtcttctcccgaatggagaccaacctcatcacgtggggggcagacaccgccgcatgcggcgacatcatcaacggcttgcccgtctccgcccgcaggggccgggagatactgctcggaccagccgacggaatggtctccaaggggtggaggttgctggcacccatcacggcatacgcccagcagacaaggggcctcctagggtgtataatcaccagcctaaccggccgggacaaaaatcaggtggagggtgaggtccagattgtgtcaactgctgcccaaacctttctggcaacgtgcatcaatggagtatgctggaccgtctaccacggggccggaacgaggaccatcgcatcacccaagggtcctgttatccagatgtacaccaatgtagataaagatctcgtgggttggcccgctcctcaaggttcccgttctttggcaccctgcacctgcggctcctcggacctttatctggtcacgaggcacgccgatgtcattcccgtgcgccggcggggtgatagcaggggcagcctgctttcgccccggcccatttcctacttgaaaggctcctcggggggtccgctgttgtgccccgcggggcacgccgtgggcattttcagggccgcggtgtgcacccgtggagtggctaaggcagtggactttatccctgtagagaacctagagacaaccatgaggtccccggtgttcacggacaactcctctccaccagcagtaccccagagcttccaggtggcccacctgcatgctcccacaggcagcggcaagagcaccaaggtcccagctgcatacgcagctcagggctataaggtgctagtgctcaacccctctgttgctgcaacactaggcttcggtgcttatatgtccaaggcccatgggatcgaccctaacatcaggaccggggtgagaacaattaccactggcagccccatcacgtactccacctacggcaagttccttgccgacggcgggtgctcagggggtgcttatgacataataatctgtgacgagtgccactccacggatgccacgtccatcttaggcatcggcaccgtccttgaccaagcagagaccgcaggggcgaggcttgttgtgctcgccaccgctacccctccgggctccatcactgtgccccatcctaacatcgaggaggttgctctgtccaccaccggagagatccccttttatggcaaggctatccccctcgaagtaatcaagggggggaggcatctcatcttctgtcattcaaagaagaagtgtgacgagctcgctgcaaagctggttgcattgggcgtcaatgccgtggcctattaccgcggtcttgacgtgtctgtcatcccgaccagcggcgatgttgtcgtcgtggcaactgatgctctcatgaccggctataccggcgacttcgactcggtgatagactgcaacacgtgtgtcacccagacagtcgatttcagccttgaccccaccttcaccattgagacaaccacgcttccccaggatgctgtctcccgtacacaacggcggggcaggactggcagggggaagccaggcacctacaggtttgtggcaccgggggagcgcccctctggcatgttcgactcgtctgtcctctgtgagtgctatgacgcgggctgtgcttggtatgagctcacgcccgccgagaccacagttaggctacgagcgtacatgaacaccccggggcttcccgtgtgccaggaccaccttgaattttgggagggcgtctttacgggccttacccatatagatgcccacttcctatcccagacaaagcagagtggggagaaccttccttacctggtagcgtaccaagccaccgtgtgcgctagggctcaagcccctcccccgtcgtgggaccagatgtggaagtgtttagtccgcctcaagcccaccctccatgggccaacacccctgctatacagattgggcgctgttcagaatgaagtcaccctgacacacccaatcacaaaatacatcatgacatgtatgtcggctga

SEQ ID NO: 9 - DNA, 4905 bp, Hepatitis C virus
tcgcccacaggacgtcaagttcccgggtggcggtcagatcgttggtggagtttacttgttgccgcgcaggggccctagattgggtgtgcgcgcgacgaggaagacttccgagcggtcgcaacctcgaggtagacgtcagcctatccccaaggcacgtcggcccgagggcaggacctgggctcagcccgggtacccctggcccctctatggcaatgagggctgcgggtgggcgggatggctcctgtctccccgtggctctcggcctaactggggccccacagacccccggcgtaggtcgcgtaatttgggtaaggtcatcgatacccttacatgcggcttcgccgacctcatggggtacataccgctcgtcggcgcccctcttgggggcgctgccagggccctggcgcatggcgtccgggttctggaagacggcgtgaactatgcaacagggaaccttcctggttgctctttctctatcttccttctggctttgctctcttgcctgactgtgcctgtttcagcctaccaagtgcgcaactccacggggctttatcatgtcaccaatgattgccctaattcgagtattgtgtacgaggcggacgatgctatcctgcacactccggggtgtgtcccttgcgtccgcgagggtaacggctcgaggtgttgggtggcgataacccccacggtggccaccagggacggcaaactccccacagtgcagcttcgacgtcacatcgatctgcttgtcgggagcgctaccctttgttcggccctttacgtgggggacctgtgcgggtctgtctttcttgtcggccaactgttcaccttctctcccaggcgccactggacaacgcaggactgcaattgttccatctatcccggccatataacgggtcaccgtatggcatgggacatgatgatgaactggtcccctacgacggcgctggtagtagctcagatgctccggatcccacaagccatcctggacatgatcgctggtgctcactggggagtcctggcgggcatagcgtatttctccatggtggggaactgggcgaaggtcctggtagtgctgctgctatttgccggcgtcgacgcgggaacccacgtcaccgggggcattgccgcccgtaccacgtctagaattgctggtctcttcaacccaggcgcccagcaggacatccagctggttaacaccaacggcagttggcacatcaacagaacggccttgaactgtaacgatagccttcacaccggctggatagcggggcttttctatcgctacaaattcaactcttcaggctgtcccgagaggttggccagctgccgaccccttaccgattttgcccagggctggggccctattagttacgccaacggaagcggccccgaccaacgcccctactgctggcactatcccccaaagccttgcggcattgtgcccgcacagagcgtgtgtggcccggtgtattgcttcactcccagccccgtggtggtgggaacgaccgacaaggcgggcgcgcctacctacagatggggtgcaaacgatacggacgtcttcgtccttaacaacaccaggccaccactgggcaattggttcggttgcacctggatgaactcaactggatacaccaaagtgtgcggggcgcccccctgcgtcatcggaggggtgggcaacaagaccttgcactgccccaccgattgtttccgcaagcatccggaagccacatactctcggtgcggctccggtccctggattacacccaggtgcctggtcgactatccgtataggctttggcattacccttgtaccatcaactacaccgtgttcaaagtcaggatgtacgtgggaggggtcgagcataggctagaggctgcctgcaactggacgcggggcgaacgttgcaatctggaagacagggacaggtccgagctcagcccgttgctgctgtccaccacacagtggcaagtccttccgtgttccttcacgaccctgccagccttgtccaccggcctcatccacctccaccagaacattgtggacgtgcagtacttatacggggtggggtcaagcatcgcgtcctgggccatcaagtgggagtacgtcgttctcctattccttctgctcgcagacgcgcgcgtctgctcctgcttgtggatgatgttactcatatcccaagcggaggcggctttggagaacctcgtagtgctcaatgcagcatctttggccgggacacacggtcttgtgtccctcctcgtgttcttctgctttgcgtggtacctgaagggtaggtgggtgcccggagcggtctacgccctctacgggatgtggcctctcctcctgctcctattggcgttgccccagcgggcatatgcgttggacacggaggtggccgcgtcgtgtggcggcgctgttcttgtcgggttgatggcgctgactctgtcaccatattacaagcgctatgtcagctggtgcttatggtggcttcagtactttctgaccagagcagaagcgcaactgcacgtgtgggttccccctctcgacgtccgaggggggcgcgacgccgtcatcttactcatgtgtgctgtacgcccgactttggtgtttgacatcaccaagctgctgctggccgtcctcggacccctctggattctccaagccagtttgcttaaagtgccctactttgtgcgcgttcaaggccttctccggatctgcgcgctagcgcggaagatggcggggggtcattacgtgcaaatggtcatcatcaagttgggggcgctcactggcacttatgtgtataaccatctcactcctcttcgggactgggcgcacaacggcctgcgagatctggctgtggctgtagagccagtcgtcttctcccgaatggagaccaacctcatcacgtggggggcagacaccgccgcatgcggcgacatcatcaacggcttgcccgtctccgcccgcaggggccgggagatactgctcggaccagccgacggaatggtctccaaggggtggaggttgctggcacccatcacggcgtacgcccagcagacaaggggcctcctagggtgtataatcaccagcctaaccggccgggacaaaaatcaggtggagggtgaggtccagattgtgtcaactgctgcccaaacctttctggcaacgtgcatcaatggagtatgctggaccgtctaccacggggccggaacgaggaccatcgcatcacccaagggtccggttatccagatgtacaccaatgtagacaaagatcttgtgggttggcccgctcctcaaggttcccgttctttggcaccctgcacctgcggctcctcggacctttatctggtcacgaggcacgccgatgtcattcccgtgcgccggcggggtgatagcaggggcagcctgctttcgccccggcccatttcctacttgaaaggctcctcggggggtccgctgttgtgccccgcggggcacgccgtgggcattttcagggccgcggtgtgcacccgtggagtggctaaggcagtggactttatccctgtagagaacctagagacaaccatgaggtccccggtgttcacggacaactcctctccaccagcagtaccccagagcttccaggtggcccacctgcatgctcccacaggcagcggcaagagcaccaaggtcccagctgcatacgcagctcagggctataaggtgctagtgctcaacccctctgttgctgcaacactaggcttcggtgcttatatgtccaaggcccatgggatcgaccctaacatcaggaccggggtgagaacaattaccactggcagccccatcacgtactccacctacggcaagttccttgccgacggcgggtgctcagggggtgcttatgacataataatctgtgacgagtgccactccacggatgccacgtccatcttaggcatcggcaccgtccttgaccaagcagagaccgcaggggcgaggcttgttgtgctcgccaccgctacccctccgggctccatcaccgtgccccatcctaacatcgaggaggttgctctgtccaccaccggagagatccccttttatggcaaggctatccccctcgaagtaatcaagggggggaggcatctcatcttctgtcattcaaagaagaagtgtgacgagctcgctgcaaagctggttgcattgggcgtcaatgccgtggcctattaccgcggtcttgacgtgtctgtcatcccgaccagcggcgatgttgtcgtcgtggcaactgatgctctcatgaccggctataccggcgacttcgactcggtgatagactgcaacacgtgtgtcacccagacagtcgatttcagccttgaccccaccttcaccattgagacaaccacgcttccccaggatgctgtctcccgtacacaacggcggggcaggactggcagggggaagccaggcacctacaggtttgtggcaccgggggagcgcccctctggcatgttcgactcgtctgtcctctgtgagtgctatgacgcgggctgtgcttggtatgagctcacgcccgccgagaccacagttaggctacgagcgtacatgaacaccccggggcttcccgtgtgccaggaccaccttgaattttgggagggcgtctttacgggccttacccatatagatgcccacttcctatcccagacaaagcagagtggggagaaccttccttacctggtagcgtaccaagccaccgtgtgcgctagggctcaagcccctcccccatcgtgggaccagatgtggaagtgtttagtccgcctcaagcccaccctccatgggccaacacccctgctatacagattgggcgctgttcagaatgaagtcaccctgacacacccaatcacaaaatacatcatgacatgtatgtcggctga

SEQ ID NO: 10 - DNA, 4905 bp, Hepatitis C virus
tcgcccacaggacgtcaagttcccgggtggcggtcagatcgttggtggagtttacttgttgccgcgcaggggccctagattgggtgtgcgcgcgacgaggaagacttccgagcggtcgcaacctcgaggtagacgtcagcctatccccaaggcacgtcggcccgagggcaggacctgggctcagcccgggtacccctggcccctctatggcaatgaaggctgcgggtgggcgggatggctcctgtctccccgtggctctcggcctaattggggccccacagacccccggcgtaggtcgcgtaatttgggtaaggtcatcgatacccttacatgcggcttcgccgacctcatggggtacataccgctcgtcggcgcccctcttgggggcgctgccagggccctggcgcatggcgtccgggttctggaagacggcgtgaactatgcaacagggaaccttcctggttgctctttctctatcttccttctggctttgctctcttgcctgactgtgcctgcttcagccttccaagtgcgcaactccacggggctttatcatgtcaccaatgattgccctaactcgagtattgtgtacgaggcggacgatgctatcctgcacactccggggtgtgtcccttgcgtccgcgagggtaacggctcgaggtgttgggtggcgataacccccacggtggccaccagggacggcaaactccccacagtgcagcttcgacgtcacatcgatctgcttgtcgggagcgctaccctttgttcggccctttacgtgggggacctgtgcgggtctgtctttcttgtcggccaactgttcaccttctctcccaggcgccactggacaacgcaggactgcaattgttccatctatcccggccatataacgggtcaccgtatggcatgggacatgatgatgaactggtcccctacgacggcgctggtagtagctcagatgctccggatcccacaagccatcctggacatgatcgctggtgctcactggggagtcctggcgggcatagcgtatttctccatggtggggaactgggcgaaggtcctggtagtgctgctgctatttgccggcgtcgacgcgggaacccacgtcaccgggggcattgccgcccgtaccacgtctggagttgctggtctcttcagcccaggcgcccagcaggacatccagctggttaacaccaacggcagttggcacatcaacagaacggccttgaactgtaacgatagccttcacaccggctggatagcggggcttttctatcgctacaaattcaactcttcaggctgtcccgagaggttggccagctgccgaccccttaccgattttgcccagggctggggccctattagttacgccaacggaagcggccccgaccaacgcccctactgctggcactatcccccaaagccttgcggcattgtgcccgcacagagcgtgtgtggcccggtgtattgcttcactcccagccccgtggtggtgggaacgaccgacaaggcgggcgcgcctacctacagatggggtgcaaacgatacggacgtcttcgtccttaacaacaccaggccaccactgggcaattggttcggttgcacctggatgaactcaactggatacaccaaagtgtgcggggcgcccccctgcgtcatcggaggggtgggcaacaagaccttgcactgccccaccgattgtttccgcaagcatccggaagccacatactctcggtgcggctccggtccctggattacacccaggtgtctggtcgactatccgtataggctttggcattacccttgtaccatcaactacaccgtgttcaaagtcaggatgtacgtgggaggggtcgagcataggctagaggctgcctgcagctggacgcggggcgaacgttgcaatctggaagacagggacaggtccgagctcagcccgttgctgctgtccaccacacagtggcaagtccttccgtgttccttcacgaccctgccagccttgtccaccggcctcatccacctccaccagaacattgtggacgtgcagtacttatacggggtggggtcaagcatcgcgtcctgggccatcaagtgggagtacgtcgttctcctattccttctgctcgcagacgcgcgcgtctgctcctgcttgtggatgatgttactcatatcccaagcggaggcggctttggagaacctcgtagtgctcaatgcagcatctttggccgggacacacggtcttgtgtccctcctcgtgttcttctgctttgcgtggtacctgaagggtaggtgggtgcccggagcggtctacgccctctacgggatgtggcctctcctcctgctcctattggcgttgccccagcgggcatatgcgttggacacggaggtggccgcgtcgtgtggcggcgctgttcttgtcgggttgatggcgctgactctgtcaccatattacaagcgctatgtcagctggtgcttatggtggcttcagtactttctgaccagagcagaagcgcaactgcacgtgtgggttccccctctcgacgtccgaggggggcgcgacgccgtcatcttactcatgtgtgctgtacgcccgactttggtgtttgacatcaccaagctgctgctggccgtcctcggacccctctggattctccaagccagtttgcttaaagtgccctactttgtgcgcgttcaaggccttctccggatctgcgcgctagcgcggaagatggcggggggtcattacgtgcaaatggtcatcatcaagttgggggcgctcactggcacttatgtgtataaccatctcactcctcttcgggactgggcgcacaacggcctgcgagatctggctgtggctgtagagccagtcgtcttctcccgaatggagaccgacctcatcacgtggggggcagacaccgccgcatgcggcgacgtcatcaacggcttgcccgtctccgcccgcaggggccgggagatactgctcggaccagccgacggaatggtctccaaggggtggaggttgctggcacccatcacggcatacgcccagcagacaaggggcctcctagggtgcataatcaccagcctaaccggccgggacaaaaatcaggtggagggtgaggtccagattgtgtcaactgctgcccaaacctttctggcgacgtgcatcaatggagtatgctggaccgtctaccacggggccggaacgaggaccatcgcatcacccaagggtcctgttatccagatgtacaccaatgtagacaaagatcttgtgggttggcccgctcctcaaggttcccgttctttggcaccctgcacctgcggctcctcggacctttatctggtcacgaggcacgccgatgtcattcccgtgcgccggcggggtgatagcaggggcagcctgctttcgccccggcccatttcctacttgaaaggctcctcggggggtccgctgttgtgccccgcggggcacgccgtgggcattttcagggccgcggtgtgcacccgtggagtggctaaggcagtggactttatccctgtagagaacctagagacaaccatgaggtccccggtgttcacggacaactcctctccaccagcagtaccccagagcttccaggtggcccacctgcatgctcccacaggcagcggcaagagcaccaaggtcccagctgcatacgcagctcagggctataaggtgctagtgctcaacccctctgttgctgcaacactaggcttcggtgcttatatgtccaaggcccatgggatcgaccctaacatcaggaccggggtgagaacaattaccactggcagccccatcacgtactccacctacggcaagttccttgccgacggcgggtgctcagggggtgcttatgacataataatctgtgacgagtgccactccacggatgccacgtccatcttaggcatcggcaccgtccttgaccaagcagagaccgcaggggcgaggcttgttgtgctcgccaccgctacccctccgggctccatcaccgtgccccatcctaacatcgaggaggttgctctgtccaccaccggagagatccccttttatggcaaggctatccccctcgaagtaatcaagggggggaggcatctcatcttctgtcattcaaagaagaagtgtgacgagctcgctgcaaagctggttgcattgggcgtcaatgccgtggcctattaccgcggtctcgacgtgtctgtcatcccgaccagcggcgatgttgtcgtcgtggcaactgatgctctcatgaccggctataccggcgacttcgactcggtgatagactgcaacacgtgtgtcacccagacagtcgatttcagccttgaccccaccttcaccattgagacaaccacgcttccccaggatgctgtctcccgtacacaacggcggggcaggactggcagggggaagccaggcacctacaggtttgtggcaccgggggagcgcccctctggcatgttcgactcgtctgtcctctgtgagtgctatgacgcgggctgtgcttggtatgagctcacgcccgccgagaccacagttaggctacgagcgtacatgaacaccccggggcttcccgtgtgccaggaccaccttgaattttgggagggcgtctttacgggccttacccatatagatgcccacttcctatcccagacaaagcagagtggggagaaccttccttacctggtagcgtaccaagccaccgtgtgcgctagggctcaagcccctcccccatcgtgggaccagatgtggaagtgtttagtccgcctcaagcccaccctccatgggccaacacccctgctatacagattgggcgctgttcagaatgaagtcaccctgacacacccaatcacaaaatacatcatgacatgtatgtcggctga

SEQ ID NO: 11 - DNA, 5260 bp, Hepatitis C virus
tcactcccctgtgaggaactactgtcttcacgcagaaagcgcctagccatggcgttagtatgagtgtcgtgcagcctccaggaccccccctcccgggagagccatagtggtctgcggaaccggtgagtacaccggaattgccaggacgaccgggtcctttcttggataaacccgctcaatgcctggagatttgggcgtgcccccgcaagaccgctagccgagtagtgttgggtcgcgaaaggccttgtggtactgcctgatagggtgcttgcgagtgccccgggaggtctcgtagaccgtgcaccatgagcacgaatcctaaacctcaaagaaaaaccaaacgtaacaccaaccgtcgcccacaggacgtcaagttcccgggtggcggtcagatcgttggtggagtttacttgttgccgcgcaggggccctagattgggtgtgcgcgcgacgaggaagacttccgagcggtcgcaacctcgaggcagacgtcagcctatccccaaggcacgtcggcccgagggcaggacctgggctcagcccgggtacccctggcccctctatggcaatgagggctgtgggtgggcgggatggctcctgtctccccgtggctctcggcctagctggggcccctcagacccccggcgtaggtcgcgtaatttgggtaaagtcatcgatacccttacatgcggcttcgccgacctcatggggtacataccgctcgtcggcgcccctcttgggggcgctgccagggccctggcgcatggcgtccgggttctggaagacggcgtgaactatgcaacagggaaccttcctggttgctctttctctatcttcctcctggctttgctctcttgcctgactgtgcctgcttcagcctaccaagtgcgcaactccacggggctttatcatgtcaccaatgattgccctaactcgagtattgtgtacgaggcggccgatgctatcctgcacactccggggtgtgtcccttgcgtctacgagggtaacgcctcgaggtgttgggtggcgataacccccacggtggccaccagggacggcaaactccccacagtgcagcttcgacgtcacatcgatctgcttgtcgggagcgccaccctttgttcggccctttacgtgggggacctgtgcgggtctgtctttcttgtcggccaactgttcaccttctctcccaggctccactggacaacgcaggactgcaattgttccatctaccccggccatataacgggtcaccgtatggcatgggacatgatgatgaactggtcccctacgacggcgctggtagtagctcagatgctccggatcccgcaagccatcttggacatgatcgctggtgctcactggggagtcctagcgggcatagcgtatttctccatggtggggaactgggcgaaggtcctagtagtgctgctgctatttgccggcgtcgacgcggaaacccacgtcaccgggggagctgccggccgtaccatggctggatttactggtctctttacacgaggcgcccagcagagcatccagttggttaacaccaacggcagttggcacatcaacagaacggctttgaactgcaacgatagccttcagaccggctggatagcggggcttctctatcacaacaaattcaactcttcaggctgtccggagaggttggccagctgccgaccccttaccgattttgcccagggctggggccctatcagttacgccaacggaagcggccccgaccaacgcccctactgctggcactaccccccaaggccttgcggcattgtgcccgcacagagcgtatgtggcccggtatattgcttcactcccagtcccgtggtggtgggaacgaccgacaggtcgggcgcgcctacctacggatggggtgcaaacgatacggacgtcttcgtccttaacaacactaggccaccactgggcaattggttcggttgcacctggatgaactcaactggatacaccaaagtgtgcggggcgcccccctgtgtcatcagaggggtgggcaacaacaccttgcactgccccaccgattgtttccgcaagcatccggaagccacatactctcggtgcggctccggtccctggattacacccaggtgcctggtcaactacccgtataggctttggcattacccttgtaccatcaactacaccgtattcaaggtcaggatgtacgtgggaggggtcgagcataggctagaggctgcctgcaactggacgcggggcgaacgttgcagtctggaagacagggacaggtccgagctcagcccgttgctgctgtccaccacacagtggcaggtccttccctgttccttcacgaccctgccagccttgtccaccggcctcatccacctccaccagaacattgtggacgtgcagtacttatacggggtggggtcaagtatcgcgtcctgggccatcaagtgggagtacgtcgttctcctattccttctgcttgcagacgcgcgcgtctgctcctgcttgtggatgatgttgctcatatcccaagcggaggcggccttggagaacctcgtagtgctcaatgcagcatctttggccgggacgcacggtcttgtgtccttcctcgtgttcttctgctttgcgtggtacctgaagggtaggtgggtgcccggagcggcctacgccctctacgggatgtggcctctcctcctgctcctgttggcgttgccccagcgggcatacgcgttggacacggaggtggccgcgtcgtgtggcggcgctgttcttgtcgggttgatggcgctgactctgtcaccacattacaagcgatatgtcagctggtgcttgtggtggcttcagtactttctgaccagagcagaagcgcaactgcacgtgtgggttccccccctcgacgtccgaggggggcgcgacgccgtcatcttactcgtgtgtgctgtacgcccgactttggtgtttgacatcaccaagctgctgctggccgtcttcgggcccctttggattctccaagccagtttgcttaaagtaccctactttgtgcgcgttcaaggccttctccggatctgcgcgctagcgcggaagatggcggggggtcattacgtgcaaatggtcatcatcaagctaggggcgctcactggcacctatgtttacaaccacctcactcctcttcgggactgggcgcacaacggcctgcgagatctggctgtggctgtagagccagtcgtcttctcccgaatggagaccaacctcatcacgtggggggcagacaccgccgcgtgcggtgacatcatcaacggcttgcccgtctccgcccgtaggggccgggagatactgctcggaccagccgacggaatggtctccaaggggtggaggttgctggcacccatcacggcatacgcccagcagacaaggggcctcctagggtgtataatcaccagcctaaccggccgggacaaaaaccaggtggagggtgaggtccagattgtgtcaactgctgcccaaaccttcctggcaacgtgcatcaatggagtatgctggaccgtctaccacggggccgggacgaggaccatcgcatcacccaagggtcctgtcatccagatgtacaccaatgtagacaaagatcttgtgggctggcccgctccccaaggttcccgttcattgacaccctgcacctgcggctcctcggacctttatctggtcacgaggcacgccgatgtcattcccgtgcgccggcggggtgatagcaggggcagcctgctttcgccccggcccatttcctacttgaaaggctcctcggggggcccgctgttgtgccccgcggggcatgctgtgggcatattcagggccgcagtgtgcacccgtggagtggctaaggcggtggactttatccctgtagagaacctagagacaaccatgaggtccccggtgttcacggacaactcctctccaccggcagtaccccagagcttccaggtggcccacctgcatgctcccacaggcagcggcaagagcaccaaggtcccggctgcatacgcagctcagggctataaggtgctagtgctcaacccttctgttgctgcaacactaggcttcggtgtttatatgtccaaggcccatgggatcgatcctaacatcaggaccggggtgagaacaattaccactggcagccccatcacgtactccacctacggcaagttccttgccgacggcgggtgctcagggggtgcttatgacataataatctgtgacgagtgccactccacggatgccacatctatcttaggcatcggcaccgtccttgaccaagcagagaccgcgggggcgaggcttgttgtgctcgccaccgctacccctccgggctctgtcaccgtgccccatcctaacatcgaggaggttgctctgtccaccaccggagagatccctttttatggcaaggctatccccctcgaagtaatcaagggggggaggcatctcatcttctgtcattcaaagaagaagtgtgacgagctcgccgcaaagctggtcgcattgggcgtcaatgccgtggcctattaccgcggccttgacgtgtctgtcatcccgaccagcggcgatgttgtcgtcgtggcaactgatgctctcatgaccggctataccggcgacttcgactcggtgatagactgcaacacgtgtgtcacccagacagttgatttcagccttgaccccaccttcaccattgagacaaccacgcttccccaggatgctgtctcccgtacacaacgtcggggcaggactggcagggggaagccaggcacctacagatttgtggcaccgggggagcgcccctccggcatgttcgactcgtctgtcctctgtgagtgctatgacgcgggctgtgcttggtatgagctcacgcccgccgagactacagttaggctacgagcgtacatgaacaccccggggcttcccgtgtgccaggaccaccttgaattttgggagggcgtctttacgggccttactcatatagatgcccacttcctatcccagacaaagcagagtggggagaaccttccttacctggtagcgtaccaagccaccgtgtgcgctagggctcaagcccctcccccatcgtgggaccagatgtggaagtgcttggtccgcctcaagcccaccctccatgggccaacacccctgctatacagattgggcgctgttcagaatgaagtcaccctgacacacccaatcacaaaatacatcatgacatgtatgtcggctga

SEQ ID NO: 12 - DNA, 4905 bp, Hepatitis C virus
tcgcccacaggacgtcaagttcccgggtggcggtcagatcgttggtggagtttacttgttgccgcgcaggggccctagattgggtgtgcgcgcgacgaggaagacttccgagcggtcgcaacctcgaggcagacgtcagcctatccccaaggcacgtcggcccgagggcaggacctgggctcagcccgggtacccctggcccctctatggcaatgagggctgtgggtgggcgggatggctcctgtctccccgtggctctcggcctagctggggcccctcagacccccggcgtaggtcgcgtaatttgggtaaagtcatcgatacccttacatgcggcttcgccgacctcatggggtacataccgctcgtcggcgctcctcttgggggcgctgccagggccctggcgcatggcgtccgggttctggaagacggcgtgaactatgcaacagggaaccttcctggttgctctttctctatcttcctcctggctttgctctcttgcctgactgtgcctgcttcagcctaccaagtgcgcaactccacggggctttatcatgtcaccaatgattgccctaactcgagtattgtgtacgaggcggccgatgctatcctgcacactccggggtgtgtcccttgcgtctacgagggtaacgcctcgaggtgttgggtggcgataacccccacggtggccaccagggatggcaaactccccacagtccagcttcgacgtcacatcgatctgcttgtcgggagcgctaccctttgttcggccctttacgtgggggatctgtgcgggtctgtttttcttgtcggccaactgttcaccttctctcccaggctccactggacaacgcaggactgcaattgttccatctaccccggccatataacgggtcaccgtatggcatgggacatgatgatgaactggtcccctacgacggcgctggtagtagctcagatgctccggatcccgcaagccatcttggacatgatcgctggtgctcactggggagtcctagcgggcatagcgtatttctccatggtggggaactgggcgaaggtcctagtagtgctgctgctatttgccggcgtcgacgcggaaacccacgtcaccgggggagctgccggccgtaccatggctggatttactggtctctttacacaaggcgccaagcagagcatccagttggttaacaccaacggcagttggcacatcaacagaacggctttgaactgcaacgatagccttcagaccggctggatagcggggcttctctatcacaacaaattcaactcttcaggctgtcccgagaggttggccagctgccgaccccttaccgattttgcccagggctggggccctatcagttacgccaacggaagcggccccgaccaacgcccctactgctggcactaccccccaaagccttgcggcattgtgcccgcacagagcgtatgtggcccggtatattgtttcactcctagccccgtggtggtgggaacgaccgacaggtcgggcgcgcctacctacggatggggtgcaaacgatacggacgtcttcgtccttaacaacaccaggccaccactgggcaattggttcggttgcacctggatgaactcaactggatacaccaaagtgtgcggggcgcccccctgtgccatcagaggggtgggcaacaacaccttgcactgccccaccgattgtttccgcaagcatccggaagccacatactctcggtgcggctccggtccctggattacacccaggtgcctggtcaactacccgtataggctttggcattacccttgtaccatcaactacaccgtgttcaaggtcaggatgtacgtgggaggggtcgagcataggctagaggctgcctgcaactggacgcggggcgaacgttgcagtctggaagacagggacaggtccgagctcagcccgttgctgctgtccaccacacagtggcaggtccttccctgttccttcacgaccctgccagccttgtccaccggcctcatccacctccaccagaacattgtggacgtgcagtacttatacggggtggggtcaagtatcgcgtcctgggccatcaagtgggagtacgtcgttctcctattccttctgcttgcagacgcgcgcgtctgctcctgcttgtggatgatgttactcatatcccaagcggaggcggccttggagaacctcgtagtgctcaatgcagcatctttggccgggacgcatggtcttgtgtccttcctcgtgttcttctgctttgcgtggtacttgaagggtaggtgggtgcccggagcggcctacgccctctacgggatgtggcctctcctcctgctcctgttggcgttgccccagcgggcatacgcgttggacacggaggtggccgcgtcgtgtggcggcgctgttcttgtcgggttgatggcgctgactctgtcaccacattacaagcgatatgtcagctggtgcttgtggtggcttcagtactttctgaccagagcagaagcgcaactgcacgtgtgggttccccccctcgacgtccgaggggggcgcgacgccgtcatcttactcatgtgtgctgtacgcccgactttggtgtttgacatcaccaagctgctgctggccgtcttcgggcccctttggattctccaagccagtttgcttaaagtaccctactttgtgcgcgttcaaggccttctccggatctgcgcgctagcgcggaagatggcggggggtcattacgtgcaaatggtcatcatcaaactaggggcgctcactggcacctatgtttataaccacctcactcctcttcgggactgggcgcacaacggcctgcgagatctggctgtggctgtagagccagtcgtcttctcccgaatggagaccaacctcatcacgtggggggcagacaccgccgcgtgcggtgacatcatcaacggcttgcccgtctccgcccgtaggggccgggagatactgctcggaccagccgacggaatggtctccaaggggtggaggttgctggcacccatcacggcatacgcccagcagacaaggggcctcctagggtgtataatcaccagcctaaccggccgggacaaaaaccaggtggagggtgaggtccagattgtgtcaactgctgcccaaactttcctggcaacgtgcatcaatggagtatgctggaccgtctaccacggggccgggacgaggaccatcgcatcacccaagggtcctgtcatccagatgtacaccaatgtagacaaagatcttgtgggctggcccgctccccaaggttcccgttcattgacaccctgcacctgcggctcctcggacctttatctggtcacgaggcacgccgatgtcattcccgtgcgccggcggggtgatagcaggggcagcctgctttcgccccggcccatttcctacttgaaaggctcctcggggggtccgctgttgtgccccgcggggcatgctgtgggcatattcagggccgcagtgtgcacccgtggagtggctaaggcggtggactttatccctgtagagaacctagagacaaccatgaggtccccggtgttcacggacaactcctctccaccggcagtaccccagagcttccaggtggcccacctgcatgctcccacaggcagcggcaagagcaccaaggtcccggctgcatacgcagctcagggctataaggtgctagtgctcaacccctctgttgctgcaacactgggcttcggtgtttatatgtccaaggcccatgggatcgatcctaacatcaggaccggggtgagaacaattaccactggcagccccatcacgtactccacctacggcaagttccttgccgacggcgggtgctcagggggtgcttatgacataataatctgtgacgagtgccactccacggatgccacatctatcttaggcatcggcaccgtccttgaccaagcagagaccgcgggggcgaggcttgttgtgctcgccaccgctacccctccgggctccgtcaccgtgccccatcctaacatcgaggaggttgctctgtccaccaccggagagatccctttttatggcaaggctatccccctcgaagtaatcaagggggggaggcatctcatcttctgtcattcaaagaagaagtgtgacgagctcgccgcaaagctggttgcattgggcgtcaatgccgtggcctattaccgcggccttgacgtgtctgtcatcccgaccagcggcgatgttgtcgtcgtggcaactgatgctctcatgaccggctataccggcgacttcgactcggtgatagactgcaatacgtgtgtcacccagacagttgatttcagccttgaccccaccttcaccattgagacaaccacgcttccccaggatgctgtctcccgtacacaacgtcggggcaggactggcagggggaagccaggcacctacagatttgtggcaccgggggagcgcccctccggcatgttcgactcgtctgtcctctgtgagtgctatgacgcgggctgtgcttggtatgagctcacgcccgccgagactacagttaggctacgagcgtacatgaacaccccggggcttcccgtgtgccaggaccaccttgaattttgggagggcgtctttacgggccttactcatatagatgcccacttcctatcccagacaaagcagagtggggagaaccttccttacctagtagcgtaccaagccaccgtgtgcgctagggctcaagcccctcccccatcgtgggaccagatgtggaagtgcttggtccgcctcaagcccaccctccatgggccaacacccctgctatacagattgggcgctgttcagaatgaagtcaccctgacacacccaatcacaaaatacatcatgacatgtatgtcggctga

SEQ ID NO: 13 - DNA, 4889 bp, Hepatitis C virus
tcgcccacaggacgtcaagttcccgggtggcggtcagatcgttggtggagtttacttgttgccgcgcaggggccctagattgggtgtgcgcgcgacgaggaagacttccgagcggtcgcaacctcgaggcagacgtcagcctatccccaaggcacgtcggcccgagggcaggacctgggctcagcccgggtacccctggcccctctatggcaatgagggctgtgggtgggcgggatggctcctgtctccccgtggctctcggcctagctggggcccctcagacccccggcgtaggtcgcgtaatttgggtaaagtcatcgatacccttacatgcggcttcgccgacctcatggggtacataccgctcgtcggcgctcctcttgggggcgctgccagggccctggcgcatggcgtccgggttctggaagacggcgtgaactatgcaacagggaaccttcctggttgctctttctctatcttcctcctggctttgctctcttgcctgactgtgcctgcttcagcctaccaagtgcgcaactccacggggctttatcatgtcaccaatgattgccctaactcgagtattgtgtacgaggcggccgatgctatcctgcacactccggggtgtgtcccttgcgtctacgagggtaacgcctcgaggtgttgggtggcgataacccccacggtggccaccagggatggcaaactccccacagtccagcttcgacgtcacatcgatctgcttgtcgggagcgctaccctttgttcggccctttacgtgggggacctgtgcgggtctgtctttcttgtcggccaactgttcaccttctctcccaggctccactggacaacgcaggactgcaattgttccatctaccccggccatataacgggtcaccgtatggcgtgggacatgatgatgaactggtcccctacgacggcgctggtagtagctcagatgctccggatcccgcaagccatcttggacatgatcgctggtgctcactggggagtcctagcgggcatagcgtatttctccatggtggggaactgggcgaaggtcctagtagtgctgctgctatttgccggcgtcgacgcggaaacccacgtcaccgggggagctgccggccgtaccatggctggatttactggtctctttacacaaggcgccaagcagagcatccagttggttaacaccaacggcagttggcacatcaacagaacggctttgaactgcaacgatagccttcagaccggctggatagcggggcttctctatcacaacaaattcaactcttcaggctgtcccgagaggttggccagctgccgaccccttaccgattttgcccagggctggggccctatcagctacgccaacggaagcggccccgaccaacgcccctactgctggcactaccccccaaagccttgcggcattgtgcccgcacagagcgtatgtggcccggtatattgtttcactcctagccccgtggtggtgggaacgaccgacaggtcgggcgcgcctacctacggatggggtgcaaacgatacggacgtcttcgtccttaacaacaccaggccaccactgggcaattggttcggttgcacctggatgaactcaactggatacaccaaagtgtgcggggcgcccccctgtgccatcagaggggtgggcaacaacaccttgcactgccccaccgattgtttccgcaagcatccggaagccacatactctcggtgcggctccggtccctggattacacccaggtgcctggtcaactacccgtataggctttggcattacccttgtaccatcaactacaccgtgttcaaggtcaggatgtacgtgggaggggtcgagcacaggctagaggctgcctgcaactggacgcggggcgaacgttgcagtctggaagacagggacaggtccgagctcagcccgttgctgctgtccaccacacagtggcaggtccttccctgttccttcacgaccctgccagccttgtccaccggcctcatccacctccaccagaacattgtggacgtgcagtacttatacggggtggggtcaagtatcgcgtcctgggccatcaagtgggagtacgtcgttctcctattccttctgcttgcagacgcgcgcgtctgctcctgcttgtggatgatgttactcatatcccaagcggaggcggccttggagaacctcgtagtgctcaatgcagcatctttggccgggacgcatggtcttgtgtccttcctcgtgttcttctgctttgcgtggtacctgaagggtaggtgggtgcccggagcggcctacgccctctacgggatgtggcctctcctcctgctcctgttggcgttgccccagcgggcatacgcgttggacacggaggtggccgcgtcgtgtggcggcgctgttcttgtcgggttgatggcgctgactctgtcaccacattacaagcgatatgtcagctggtgcttgtggtggcttcagtactttctgaccagagcagaagcgcaactacacgtgtgggttccccccctcgacgtccgaggggggcgcgacgccgtcatcttactcatgtgtgctgtacgcccgactttggtgtttgacatcaccaagctgctgctggccgtcttcgggcccctttggattctccaggccagtttgcttaaagtaccctactttgtgcgcgttcaaggccttctccggatctgcgcgctagcgcggaagatggcggggggtcattacgtgcaaatggtcatcatcaaactaggggcgctcactggcacctatgtttataaccacctcactcctcttcgggactgggcgcacaacggcctgcgagatctggctgtggctgtagagccagtcgtcttctcccgaatggagaccaacctcatcacgtggggggcagacaccgccgcgtgcggtgacatcatcaacggcttgcccgtctccgcccgtaggggccgggagatactgctcggaccagccgacggaatggtctccaaggggtggaggttgctggcacccatcacggcatacgcccagcagacaaggggcctcctagggtgtataatcaccagcctaaccggccgggacaaaaaccaggtggagggtgaggtccagattgtgtcaactgctgcccaaactttcctggcaacgtgcatcaatggagtatgctggaccgtctaccacggggccgggacgaggaccatcgcatcacccaagggtcctgtcatccagatgtacaccaatgtagacaaagatcttgtgggctggcccgctccccaaggttcccgttcattgacaccctgcacctgtggctcctcggacctttatctggtcacgaggcacgccgatgtcattcccgtgcgccggcggggtgatagcaggggcagcctgctttcgccccggcccatttcctacttgaaaggctcctcggggggtccgctgttgtgccccgcggggcatgctgtgggcatattcagggccgcagtgtgcacccgtggagtggctaaggcggtggactttatccctgtagagaacctagagacaaccatgaggtccccggtgttcacggacaactcctctccaccggcagtaccccagagcttccaggtggcccacctgcatgctcccacaggcagcggcaagagcaccaaggtcccggctgcatatgcagctcagggctataaggtgctagtgctcaacccctctgttgctgcaacactgggcttcggtgtttatatgtccaaggcccatgggatcgatcctaacatcaggaccggggtgagaacaattaccactggcagccccatcacgtactccacctacggcaagttccttgccgacggcgggtgctcagggggtgcttatgacataataatctgtgacgagtgccactccacggatgccacatctatcttaggcatcggcaccgtccttgaccaagcagagaccgcgggggcgaggcttgttgtgctcgccaccgctactcctccgggctccgtcaccgtgccccatcctaacatcgaggaggttgctctgtccaccaccggagagatccctttttatggcaaggctatccccctcgaagtaatcaagggggggaggcatctcatcttctgtcattcaaagaagaagtgtgacgagctcgccgcaaagctggttgcattgggcgtcaatgccgtggcctattaccgcggccttgacgtgtctgtcatcccgaccagcggcgatgttgtcgtcgtggcaactgatgctctcatgaccggctataccggcgacttcgactcggtgatagactgcaatacgtgtgtcacccagacagttgatttcagccttgaccccaccttcaccattgagacaaccacgcttccccaggatgctgtctcccgtacacaacgtcggggcaggactggcagggggaagccaggcacctacagatttgtggcaccgggggagcgcccctccggcatgttcgactcgtctgtcctctgtgagtgctatgacgcgggctgtgcttggtatgagctcacgcccgccgagactacagttaggctacgagcgtacatgaacaccccggggcttcccgtgtgccaggaccaccttgaattttgggagggcgtctttacgggccttactcatatagatgcccacttcctatcccagacaaagcagagtggggagaaccttccttacctggtagcgtaccaagccaccgtgtgcgctagggctcaagcccctcccccatcgtgggaccagatgtggaagtgcttggtccgcctcaagcccaccctccatgggccaacacccctgctatacagattgggcgctgttcagaatgaagtcaccctgacacacccaatcacaaaatacatcatga

SEQ ID NO: 14 - DNA, 4905 bp, Hepatitis C virus
tcgcccacaggacgtcaagttcccgggtggcggtcagatcgttggtggagtttacttgttgccgcgcaggggccctagattgggtgtgcgcgcgacgaggaagacttccgagcggtcgcaacctcgaggcagacgtcagcctatccccaaggcacgtcggcccgagggcaggacctgggctcagcccgggtacccctggcccctctatggcaatgagggctgtgggtgggcgggatggctcctgtctccccgtggctctcggcctagctggggcccctcagacccccggcgtaggtcgcgtaatttgggtaaagtcatcgatacccttacatgcggcttcgccgacctcatggggtacataccgctcgtcggcgctcctcttgggggcgctgccagggccctggcgcatggcgtccgggttctggaagacggcgtgaactatgcaacagggaaccttcctggttgctctttctctatcttcctcctggctttgctctcttgcctgactgtgcctgcttcagcctaccaagtgcgcaactccacggggctttatcatgtcaccaatgattgccctaactcgagtattgtgtacgaggcggccgatgctatcctgcacactccggggtgtgtcccttgcgtctacgagggtaacgcctcgaggtgttgggtggcgataacccccacggtggccaccagggatggcaaactccccacagtccagcttcgacgtcacatcgatctgcttgtcgggagcgctaccctttgttcggccctttacgtgggggacctgtgcgggtctgtctttcttgtcggccaactattcaccttctctcccaggctccactggacaacgcaggactgcaattgttccatctaccccggccatataacgggtcaccgtatggcatgggacatgatgatgaactggtcccctacgacggcgctggtagtagctcagatgctccggatcccgcaagccatcttggacatgatcgctggtgctcactggggagtcctagcgggcatagcgtatttctccatggtggggaactgggcgaaggtcctagtagtgctgctgctatttgccggcgtcgacgcggaaacccacgtcaccgggggagctgccggccgtaccatggctggatttactggtctctttacacaaggcgccaagcagagcatccagttggttaacaccaacggcagttggcacatcaacagaacggctttgaactgcaacgatagccttcagaccggctggatagcggggcttctctatcacaacaaattcaactcttcaggctgtcccgagaggttggccagctgccgaccccttaccgattttgcccagggctggggccctatcagttacgccaacggaagcgggcccgaccaacgcccctactgctggcactaccccccaaagccttgcggcattgtgcccgcacagagcgtatgtggcccggtatattgtttcactcctagccccgtggtggtgggaacgaccgacaggtcgggcgcgcctacctacggatggggtgcaaacgatacggacgtcttcgtccttaacaacaccaggccaccactgggcaattggttcggttgcacctggatgaactcaactggatacaccaaagtgtgcggggcgcccccctgtgtcatcagaggggtgggcaataacaccttgcactgccccaccgattgtttccgcaagcatccggaaaccacatactctcggtgcggctccggtccctggattacacccaggtgcctggtcaactacccgtataggctttggcattacccttgtaccatcaactacaccgtgttcaaggtcaggatgtacgtgggaggggtcgagcataggctagaggctgcctgcaactggacgcggggcgaacgttgcagtctggaagacagggacaggtccgagctcagcccgttgctgctgtccaccacacagtggcaggtccttccctgttccttcacgaccctgccagccttgtccaccggcctcatccacctccaccagaacattgtggacgtgcagtacttatacggggtggggtcaagtatcgcgtcctgggccatcaagtgggagtacgtcgttctcctattccttctgcttgcagacgcgcgcgtctgctcctgcttgtggatgatgttactcatatcccaagcggaggcggccttggagaacctcgtagtgctcaatgcagcatctttggccgggacgcatggtcttgtgtccttcctcgtgttcttctgctttgcgtggtacctgaagggtaggtgggtgcccggagcgacctacgccctctacgggatgtggcctctcctcctgctcctgttggcgttgccccagcgggcatacgcgttggacacggaggtggccgcgtcgtgtggcggcgctgttcttgtcgggttgatggcgctgactctgtcaccacattacaagcgatatgtcagctggtgcttgtggtggcttcagtactttctgaccagagcagaagcgcaactgcacgtgtgggttccccccctcgacgtccgaggggggcgcgacgccgtcatcttactcatgtgtgctgtacgcccgactttggtgtttgacatcaccaagctgctgctggccgtcttcgggcccctttggattctccaagccagtttgcttaaagtaccctactttgtgcgcgttcaaggccttctccggatctgcgcgctagcgcggaagatggcggggggtcattacgtgcaaatggtcatcatcaaactaggggcgctcactggcacctatgtttataaccacctcactcctcttcgggactgggcgcacaacggcctgcgagatctggctgtggctgtagagccagtcgtcttctcccgaatggagaccaacctcatcacgtggggggcagacaccgccgcgtgcggtgacatcatcaacggcttgcccgtctccgcccgtaggggccgggagatactgctcggaccagccgacggaatggtctccaaggggtggaggttgctggcacccatcacggcatacgcccagcagacaaggggcctcctagggtgtataatcaccagcctaaccggccgggacaaaaaccaggtggagggtgaggtccagattgtgtcaactgctgcccaaactttcctggcaacgtgcatcaacggagtatgctggaccgtctaccacggggccgggacgaggaccatcgcatcacccaagggtcctgtcatccagatgtacaccaatgtagacaaagatcttgtgggctggcccgctccccaaggctcccgttcattgacaccctgcacctgcggctcctcggacctttatctggtcacgaggcacgccgatgtcattcccgtgcgccggcggggtgatagcaggggcagcctgctttcgccccggcctatttcctacttgaaaggctcctcggggggtccgctgttgtgccccgcggggcatgctgtgggcatattcagggccgcagtgtgcacccgtggagtggctaaggcggtggactttatccctgtagagaacctagagacaaccatgaggtccccggtgttcacggacaactcctctccaccggcagtaccccagagcttccaggtggcccacctgcatgctcccacaggcagcggcaagagcaccaaggtcccggctgcatacgcagctcagggctataaggtgctagtgctcaacccctctgttgctgcaacactgggcttcggtgtttatatgtccaaggcccatgggatcgatcctaacatcaggaccggggtgagaacaattaccactggcagccccatcacgtactccacctacggcaagttccttgccgacggcgggtgctcagggggtgcttatgacataataatctgtgacgagtgccactccacggatgccacatctatcttaggcatcggcaccgtccttgaccaagcagagaccgcgggggcgaggcttgttgtgctcgccaccgctacccctccgggctccgtcaccgtgccccatcctaacatcgaggaggttgctctgtccaccaccggagagatccctttttatggcaaggctatccccctcgaagtaatcaagggggggaggcatctcatcttctgtcattcaaagaagaagtgtgacgagctcgccgcaaagctggttgcattgggcgtcaatgccgtggcctattaccgcggccttgacgtgtctgtcatcccgaccagcggcgatgttgtcgtcgtggcaactgatgctctcatgaccggctataccggcgacttcgactcggtgatagactgcaatacgtgtgtcacccagacagttgatttcagccttgaccccaccttcaccattgagacaaccacgcttccccaggatgctgtctcccgtacacaacgtcggggcaggactggcagggggaagccaggcacctacagatttgtggcaccgggggagcgcccctccggcatgttcgactcgtctgtcctctgtgagtgctatgacgcgggctgtgcttggtatgagctcacgcccgccgagactacagttaggctacgagcgtacatgaacaccccggggcttcccgtgtgccaggaccaccttgaattttgggagggcgtctttacgggccttactcatatagatgcccacttcctatcccagacaaagcagagtggggagaaccttccttacctggtagcgtaccaagccaccgtgtgcgctagggctcaagcccctcccccatcgtgggaccagatgtggaagtgcttggtccgcctcaagcccaccctccatgggccaacacccctgctatacagattgggcgctgttcagaatgaagtcaccctgacacacccaatcacaaaatacatcatgacatgtatgtcggctga

SEQ ID NO: 15 - DNA, 4905 bp, Hepatitis C virus
tcgcccacaggacgtcaagttcccgggtggcggtcagatcgttggtggagtttacttgttgccgcgcaggggccctagattgggtgtgcgcgcgacgaggaagacttccgagcggtcgcaacctcgaggcagacgtcagcctatccccaaggcacgtcggcccgagggtaggacctgggctcagcccgggtacccctggcccctctatggcaatgagggctgtgggtgggcgggatggctcctgtctccccgtggctctcggcctagctggggcccctcagacccccggcgtaggtcgcgtaatttgggtaaagtcatcgatacccttacatgcggcttcgccgacctcatggggtacataccgctcgtcggcgcccctcttgggggcgctgccagggccctggcgcatggcgtccgggttctggaagacggcgtgaactatgcaacagggaaccttcctggttgctctttctctatcttcctcctggctttgctctcttgcctgactgtgcctgcttcagcctaccaagtgcgcaactccacggggctttatcatgtcaccaatgattgccctaactcgagtattgtgtacgaggcggccgatgctatcctgcacactccggggtgtgtcccttgcgtctacgagggtaacgcctcgaggtgttgggtggcgataacccccacggtggccaccagggacggcaaactccccacagtgcagcttcgacgtcacatcgatctgcttgtcgggagcgctaccctttgttcggccctttacgtgggggacctgtgcgggtctgtctttcttgtcggccaactgttcaccttctctcccaggctccactggacaacgcaggactgtaattgttccatctaccccggccatataacgggtcaccgtatggcatgggacatgatgatgaactggtcccctacgacggcgctggtagtagctcagatgctccggatcccgcaagccatcttggacatgatcgctggtgctcactggggagtcctagcgggcatagcgtatttctccatggtggggaactgggcgaaggtcctagtagtgctgctgctatttgccggcgtcgacgcggggacccacgtcaccgggggagctgccggccgtaccacggctggatttgctggtctctttacacgaggcgcccagcagagcatccagttggttaacaccaacggcagttggcacatcaacagaacggctttgaactgcaacgatagccttcagaccggctggatagcggggcttctctatcacaacaaattcaactcttcaggctgtcccgagaggttggccagctgccgaccccttaccgattttgcccagggctggggccctatcagttacgccaacggaagcggccccgaccaacgcccctactgctggcactaccccccaaagccttgcggcattgtgcccgcacagagcgtatgtggcccggtatattgtttcacccctagccccgtggtggtgggaacgaccgacaggtcgggcgcgcctacctacggatggggtgcaaacgatacggacgtcttcgtcctcaacaacaccaggccaccactgggcaattggttcggttgcacctggatgaactcaactggatataccaaagtgtgcggggcgcccccctgtttcatcagaggggtgggcaacaacaccttgcactgccccaccgattgcttccgcaagcatccggaagccacatactctcggtgcggctccggtccctggattacacccaggtgcctggtcaactacccgtataggctttggcattacccttgtaccatcaactacaccgtgttcaaggtcaggatgtacgtgggaggggttgagcataggctagaggctgcctgcaactggacgcggggcgaacgttgcagtctggaagacagggacaggtccgagctcagcccgttgctgctgtccaccacacagtggcaggtccttccctgttccttcacgaccctgccagccttgtccactggcctcatccacctccaccagaacattgtggacgtgcagtacttatacggggtggggtcaagtatcgcgtcctgggccatcaagtgggagtacgtcgttctcctattccttctgcttgcagacgcgcgcgtctgctcctgcttgtggatgatgttgctcatatcccaagcggaggcggccttggagaacctcgtagtgctcaatgcagcatctttggccgggacgcatgggtttgtgtccttcctcgtgttcttctgctttgcgtggtacctgaagggtaggtgggtgcccggagcagcctacgccctctacgggatgtggcctctcctcctgctcctgttggcgttgccccagcgggcatacgcgttggacacggaggtggccgcgtcgtgtggcggcgctgttcttgtcgggttgatggcgctgactctgtcaccacattacaagcgatatgtcagctggtgcttgtggtggcttcagtactttctgaccagagcagaagcgcaactgcacgtgtgggttccccccctcgacgtccgaggggggcgcgacgccgtcatcttactcatgtgtgctgtacgcccgactttggtgtttgacatcaccaagctgctgctggccgtcttcgggcccctttggattctccaagccagtttgctcaaagtaccctactttgtgcgcgttcaaggccttctccggatctgcgcgctagcgcggaagatggcggggggtcattacgtgcaaatggtcatcatcaagctaggggcgctcactggcacctatgtttataaccacctcactcctcttcgggactgggcgcacaacggcctgcgagatctggctgtggctgtagagccagtcgtcttctcccgaatggagaccaacctcatcacgtggggggcagacaccgccgcgtgcggtgacatcatcaacggcttgcccgtctccgcccgtaggggccgggagatactgctcggaccagccgacggaatggtctccaaggggtggaggttgctggcacccatcacggcatatgcccagcagacgaggggcctcctagggtgtataatcaccagcctaaccggccgggacaaaaaccaggtggagggtgaggtccagattgtgtcaactgctgcccaaactttcctggcaacgtgcatcaatggagtatgctggaccgtctaccacggggccgggacgaggaccatcgcatcacccaagggtcctgtcatccagatgtacaccaatgtagacaaagatcttgtgggctggcccgctccccaaggttcccgttcattgacaccctgcacctgcggctcctcggacctttatctggtcacgaggcacgccgatgtcattcccgtgcgccggcggggtgatagcaggggcagcctgctttcgccccggcccatttcctacttgaaaggctcctcggggggtccgctgttgtgccccgcggggcatgctgtgggcatattcagggccgcagtgtgcacccgtggagtggctaaggcggtggactttatccctgtagagaacctagagacaaccatgaggtccccggtgttcacggacaactcctctccaccggcagtaccccagagcttccaggtggcccacctgcatgctcccacaggcagcggcaagagcaccaaggtcccggctgcatacgcagctcagggctataaggtgctagtgctcaacccctctgttgctgcaacactaggcttcggtgtttatatgtccaaggcccatgggatcgatcctaacatcaggaccggggtgagaacaattaccactggcagccccatcacgtactccacctacggcaagttccttgccgacggcgggtgctcagggggtgcttatgacataataatctgtgacgagtgccactccacggatgccacatctatcttaggcatcggcaccgtccttgaccaagcagagaccgcgggggcgaggcttgttgtgctcgccaccgctacccctccgggctccgtcaccgtgccccatcctaacatcgaggaggttgctctgtccaccaccggagagatccctttttatggcaaggctatccccctcgaagtaatcaagggggggaggcatctcatcttctgtcattcaaagaagaagtgtgacgagctcgccgcaaagctggttgcattgggcgtcaatgccgtggcctattaccgcggccttgacgtgtctgtcatcccgaccagcggcgatgttgtcgtcgtggcaactgatgctctcatgaccggctataccggcgacttcgactcggtgatagactgcaacacgtgtgtcacccagacagttgatttcagccttgaccccaccttcaccattgagacaaccacgcttccccaggatgctgtctcccgtacacaacgtcggggcaggactggcagagggaagccaggcacctacagatttgtggcaccgggggagcgcccctccggcatgttcgactcgtctgtcctctgtgagtgctatgacgcgggctgtgcttggtatgagctcacgcccgccgagactacagttaggctacgagcgtacatgaacaccccgggacttcccgtgtgccaggaccaccttgaattttgggagggcgtctttacgggccttactcatatagatgcccacttcctatcccagacaaagcagagcggggagaaccttccttacctggtagcgtaccaagccaccgtgtgcgctagggctcaagcccctcccccatcgtgggaccagatgtggaagtgcttggtccgcctcaagcccaccctccatggaccaacacccctgctatacagattgggcgctgttcagaatgagatcaccctgacacacccaatcacaaaatacatcatgacatgtatgtcggctga

SEQ ID NO: 16 - DNA, 4905 bp, Hepatitis C virus
tcgcccacaggacgtcaagttcccgggcggcggccagatcgttggtggagtttacttgttgccgcgcaggggccctagattgggtgtgcgcgcgacgaggaagacttccgagcggtcgcaacctcgaggtagacgtcagcctatccccaaggcgcgtcggtccgagggcaggacctgggctcagcccgggtacccttggcccctctatggcaatgagggttgcggatgggcgggatggctcctgtccccccgtggctctcggcctagctggggccccacagacccccggcgtaggtcgcgcaatttgggcaaggtcatcgataccctcacgtgcggcttcgccgacctcatggggtacataccgctcgtcggcgcccctcttgggggcgctgccagggccctggcgcatggagtccgggttctggaagacggcgtgaattatgcaacagggaacctccccggttgctctttctctatcttccttctggccttgctctcttgcctgactgtgcccgcttcagcctaccaagtgcgcaactccacggggctttaccatgtcaccaatgattgccctaattcgagtattgtgtacgaggcggccgatgctatcctgcacaccccggggtgtgtcccttgcgttcgtaagggtaacacctcggtgtgttgggtggcggtaacccctacggtggccaccagggacggcaaactccccacaacgcagcttcgacgtcatatcgatctgctcgtcgggagtgccaccctctgttcggccctctatgtgggggacctgtgcgggtctgtctttcttgttggccaactgtttaccctctctcccagacgccactggacaacgcaaggctgcaattgttccatctatcccggccatataacgggccaccgcatggcatgggatatgatgatgaactggtcccctacaacggcgttggtaatggcacagctgctccggatcccacaagccatcatggacatgatcgctggtgctcactggggagtcctggcgggcatagcgtatttctctatggtggggaactgggcgaaggtcctggtagtgctgctgctatttgccggcgtcgacgcaaaaacttatgtcaccgggggagctgctgcccacaccacgtccggacttgctgggctcttcttacaaggccccaagcagaacgtccacttgatcaacaccaacggcagttggcacatcaatagtacggccttgaactgcaacgctagccttgacaccggctggatagcagggcttttctattacaacaaattcaactcttcaggttgtcccgagaggttggccagctgccgactccttactgattttgaccagggctggggccctatcagtcatgccaacggaagcggccccgaccaacgcccctactgctggcactaccccccaaaaccttgcggcattgtgcccgcgaagagtgtgtgtggcccggtatattgcttcactcccagccctgtggtggtgggaacgaccgacaggtcgggcgaacctacctacaactggggtgaaaatgatacggacgtcttcgtccttaacaacatcaggccaccgctgggtaattggtttggttgtacctggatgaactcaaccggattcaccaaagtgtgcggggcgcctccttgtgacatcgggggggcgggcaacaacaccttgcactgccccactgattgtttccgcaagcatccggaagccacgtactctcggtgcggctccggtccctggatcacgcccaggtgcctggtccactacccatacaggctttggcattatccctgtaccatcaactacaccatatttaaagtcaggatgtacgtgggagggatcgagcacaggttggaagctgcctgcaactggacgcggggcgagcgttgcgatctggaagacagggacaggtccgagcttagcccgttgctgctgtctaccacacagtggcaagtccttccgtgttccttcacggccatgccagccttgtccaccggcctcatccacctccaccagaacattgtggatgtgcagtatttgtacggggtggggtcaagcattgcgtcctgggccattaagtgggagtacgtcgttctcctgttccttttgcttgcagacgcgcgcgtctgctcctgcttgtggatgatgttactcatatcccaagcggaggcggctttggagaaccttgtaatactcaatgcagcatccctggccgggacgcacggtcttgtatccttcctcgtgttcttctgctttgcatggtatctgaaaggcaggtgggtgcccggagcggcttacgccttctacgggatgtggcctctcctcctgctcctgctggcgttgccccagcgggcatacgcgctggacacggaggtggccgcgtcgtgtggcggcgttgtccttgtcgggttaatggcgctgactttatcaccacactacaagcgctatatcagctggtgcttatggtggcttcagtattttctgaccagagcggaagcgcagctgcacgtgtgggttccccccctcaacgtccggggggggcgtgacgctgtcatcttactcatgtgtgttgtacacccgactctggtattcgacatcaccaaaatgctgctggccgtctatggacccctctggattcttcaagccagtttgcttgaggtaccctactttgtgcgcgtccaaggccttctccggatctgcgcgctagcgcggaagatggtcggaggccattacgtgcaaatggccatcatcaagttaggggcgcttactggcacctatatttataatcatctcacccctcttcaggactgggcgcacaacggcctgcgagacctggccgcggctgtagagccagtcgttttctcccaaatggagaccaagctcatcacgtggggggcagacactgccgcgtgcggtgacattgtcgacggcttacccgtctccgcccgtaggggccgggagatactgcttgggccggccgatggaatggtctccaaggggtggaggttgctggcgcccatcacggcgtacgcccagcagacaaggggcctcctagggtgtataatcaccagcctaactggccgggacaaaaaccaagtggaaggtgaggtccagattgtgtcgactgctgcccaaactttcctggcaacgtgcatcaatggggtatgctggactgtctaccacggggccggaacgaggaccatcgcatcacccaagggtcctgttatccagatgtataccaatgtagaccaagaccttgtgggctggcccgctcctcaaggtgcccgctcattgacaccctgcacctgcggctcctcggacctttacttggtcacgaggcacgccgatgtcattcccgtgcgccggcggggtgatagcaggggcagcctgctctcgccccggcctatttcctacttgaaaggctcctcgggaggtccgctgttgtgccccgcgggacacgccgtgggcatatttagggccgcggtgtgtacccgtggagtggctaaggcggtggactttatccccgtggagagcctggaaacaaccatgaggtccccggtgtttacggacaactcctccccaccagcggtgccccagaccttccaggtggcccatttgcatgctcccacaggcagcggcaagagcaccaaagtcccggctgcatatgcagctcagggttataaggtgctagtgctcaacccctctgtcgctgcaacattgggctttggtgcctacatgtctaaggcccatgggatcgatcctaacatcaggaccggggtgaggacaattaccactggcagccccatcacgtactccacctacggtaagttccttgccgacggcgggtgctcagggggcgcttatgacataataatctgtgacgagtgccattccacggatgccacatccatcttgggcatcggcactgtccttgaccaagcagagaccgcgggggcgagactggttgtgctcgccaccgctacccctccgggctctatcactgtgccacatcccaacatcgaggaggttgctctgtccaccaccggagagatccctttttacggcaaggccatcccccttgatgtaatcaagggggggagacatctcattttctgtcactcaaagaagaagtgtgacgagcttgccgcaaagctggtcgcattgggcgtcaatgccgtggcctactaccgcggtctcgacgtatctgtcatcccgaccggcggcgatgttgtcgtcgtggcaactgatgctctcatgaccggctttactggcgacttcgactcggtgatagactgcaacacgtgcgtcacccagacagtcgatttcagccttgaccctaccttcaccattgagacaaccacgcttccccaggatgctgtctcccgcactcaacgtcggggcaggactggcagggggaggcaaggcacctacagatttgtggcaccgggggagcgcccctctggcatgttcgactcgtctgtcctctgtgagtgctatgacgcgggctgtgcttggtacgagctcacgcctgccgagaccacagttaggctacgagcgtatatgaacaccccggggcttcccgtgtgtcaagaccatcttgaattttgggagggcgtctttacaggcctcacccatatagatgcccacttcctatcccagacaaaacagagcggggagaatcttccttacctggtagcgtaccaagccaccgtgtgcgctagggcgcaagccccccccccatcgtgggaccagatgtggaagtgtttggtccgcctcaaacccaccctccacgggccaacacccctgctatacagactgggtgctgttcaaaatgaagtcaccctgacgcacccagtcaccaaatacatcatgacatgtatgtcggctga

SEQ ID NO: 17 - DNA, 4903 bp, Hepatitis C virus
accaaccgtcgcccacaggacgtcaagttcccgggtggcggtcagatcgttggtggagtttacttgttgccgcgcaggggccctagattgggtgtgcgcgcgacgaggaagacttccgagcggtcgcaacctcgtggtagacgtcagcctatccccaaggcacgtcggcccgagggcaggacctgggctcagcccgggtacccctggcccctctatggcaatgagggctgcgggtgggcgggatggctcctgtctccccgcggctctcggcctagttggggccccacggacccccggcgtaggtcgcgcaatttgggtaaggtcatcgataccctcacatgcggcttcgccgacctcatggggtacataccgctcgtcggcgcccctcttggaggcgctgccagggccctggcgcatggcgtccgggttctggaagacggcgtgaactatgcaacagggaatcttcctggttgctctttctctatcttccttctggctctgctctcttgcctgactgtgcccgcttcagcctaccaagtgcgcaactctacggggctttaccatgtcaccaatgattgccctaactcgagcattgtgtacgaggcggccgatgccatcctgcacactccggggtgtgtcccttgcgtccgcgagggtaactcctcgaggtgttgggtggcggtgacccccacggtagccactaaggacggcaagctccccacaaggcagcttcgacgtcacatcgatctgcttgtcgggagcgccaccctctgctcggccctctacgtgggggacctgtgcgggtccgtctttcttgtcggtcagctgttcaccttctctcccaggcgccactggacgacgcaagactgcaattgttctatctatcccggccatataacgggtcaccgcatggcgtgggatatgatgatgaactggtcccctacggcggcattggtagtagctcagctgctccggatcccacaagccatcttggacatgatcgccggtgctcactggggagtcctggcgggcatggcgtatttctccatggtggggaactgggcgaaggtcttggtagtgctgctgctatttgccggcgtcgacgcgcaaacccgcgtcaccgggggaagtgtcgcctacaccacggctggtattgctaggtttttccaaccaggcgccaagcagaacatccagctgatcaacaccaacggcagttggcacatcaatagcacggccttgaactgcaatgcaagccttgaaaccggctggttagcaggacttttctatcacaacagattcaactcttcaggctgtcctgagaggttggccagctgccgaagccttgccgactttgaccagggctggggccccatcagccatgccaatggaagcggccccgaccaccgcccctactgctggcactaccccccaaaaccttgtggtattgtgcccgcaaagaacgtgtgtggcccggtatattgcttcacccccagccccgtggtggtgggaacgaccgacagggcgggtgcgcctacctacaactggggcgcaaatgaaacggacgtcttcgtccttaacaacaccaggccaccgcagggcaattggttcggttgtacctggatgaactcaaccgggttcaccaaagtgtgcggagcgcccccttgtgccatcggaggggtgggcaacaacaccttgcactgccccactgattgtttccgcaagcatccggaagccacgtactctcggtgcggttctggtccctggatcacacccaggtgcatggtccactacccgtataggctctggcattatccctgtaccatcaactacactttatttaaagtcaggatgtacgtgggtggggtcgagcacaggctggaagctgcctgcaactggacgcggggcgaacgttgtgatctggaagacagggacaggtctgagcttagcccgttgctgctgtccaccacacagtggcaggtcctcccatgttcctttacgaccctgccagccttgtccaccggcctcatccacctccaccagaacattgtggacgtgcagtatttgtacggggtggggtcaagcatcgcgtcctgggccattaaatgggagtacgtcgtcctcctgttccttctgctcgcagacgcacgcgtctgctcttgcttgtggatgatgttactcatatcccaagcggaggcggctttggagaacctcgtggtactcaatgcagcatccctggccgggacgcacggtcttgtacccttcctcgtgttcttctgctttgcgtggtacctgaagggtaggtgggtgcccggagcggtctacgccctctacgggatgtggcctctcctcctgctcttgttggcgttgccccagcgagcatacgcactggacacggaggtggccgcgtcgtgtggcggcgttgttcttgtcgggttgatggcgctgactctgtcaccatattacaagcactatatcagctggtgcatgtggtggcttcagtactttctgaccagagcagaagcgcaactgcacgtgtgggttccccctctcaacgtccgaggggggcgtgacgccgtcatcttactcacgtgtgttgtacacccgactttggtatttgacatcaccaaactactcctggccgttatcgggcccctttggatccttcaagccagtttgcttaaagtaccctacttcgtgcgcgttcagggccttctccgaatctgcgcactagcgcggaaaatggccggaggccattacgtgcaaatggccatcatcaagttaggggcgcttactggcacctatgtctacaaccatctcactccccttcgagactgggcgcacaacggcctgcgagatctggccgtggctgtggagccagtcgtcttctcccaaatggagaccaagctcatcacgtggggggcagacaccgccgcgtgcggtgacatcatcgacggcttgcccgtctccgcccgtaggggccgggagatattgctcgggccggccgatggaatggtctccaaggggtggaggttgctggcgcccatcacagcgtacgcccagcagacaaggggcctcctagggtgtataatcaccagcctgactggccgggacaaaaaccaagcggagggtgaggtccagattgtgtcaactgctgcccaaactttcctggcaacgtgcatcaatggggtatgctggactgtctaccacggggccggaacgaggaccattgcatcacccaagggtcctgttattcagatgtacaccaatgtggacaaagacctcgtgggctggcccgcccctcaaggtacccgctcattgacaccctgcacctgcggctcctcggacctttacttggtcacgaggcacgccgatgtcattcccgtgcgccggcgaggtgatagcagaggcagcctactttcgccccggcccatttcctacttgaaaggctcctcggggggtccactgttgtgccccgcggggcacgccgtgggcatattcagggccgcggtgtgcacccgtggagtggctaaagcggtggactttatccctgtggagaacctagagacaaccatgaggtccccggtgttctcggacaactcctctccaccagcagtgccccagagcttccaggtggctcacctgcatgctcccaccggcagcggtaaaagcaccaaggtcccggccgcatacgctgctcagggctacaaggtgctagtgctcaacccctctgttgccgcaacactggcctttggcgcttacatgtccaaggcccatggggtcgatcctaatgtcaggaccggggtgagaacaattaccactggcagcccaatcacgtactccacctacggcaagttccttgctgacggcgggtgctcggggggtgcctatgacataataatttgtgacgagtgccactccacggatgccacgtccatcttgggcatcggcactgtccttgaccaagcagagaccgcgggggcgaggctggttgtgctcgccaccgctacccctccgggctccgtcaccgtgccccatcctaacatcgaggaggttgctctgtccaccaccggagaggtccccttttacggcaaggctatccccctcgaggtaatcaagggggggagacatctcatcttctgtcactcaaaaaagaagtgcgacgagctcgccgcaaagctggtcgcgttgggcatcaatgccgtggcctactaccgtggccttgacgtgtctgtcatcccgaccagcggcgatgttgtcgtcgtggcgaccgatgctctcatgaccggctatactggcgacttcgactcggtgatagactgcaacacgtgtgtcacccaaacagtcgacttcagccttgaccctaccttcaccattgagacaaccacgctcccccaggatgctgtctcccgtactcaacgccggggcaggaccggcagggggaagtcaggcatctacagattcgtggcaccaggggagcgcccttccggcatgttcgactcgtccgtcctctgtgagtgctatgacgcgggctgtgcttggtatgagctcacgcccgctgagaccactgttaggctacgagcgtacatgaacaccccggggcttcctgtgtgccaggaccatcttgagttttgggagggcgtttttacaggcctcacccacatagatgcccactttctatcccagacaaagcagagtggggagaaccttccttacctggtagcgtaccaggccaccgtgtgcgctagggctcaagcccctcccccatcgtgggaccagatgtggaagtgtttgatccgcctcaagcccaccctccatgggccaacacctctgctatacagactgggcgctgttcagaatgaagtcaccttgacgcacccagtcaccaaatacatcatgacatgca

SEQ ID NO: 18 - DNA, 4903 bp, Hepatitis C virus
accaaccgtcgcccacaggacgtcaagttcccgggtggcggtcagatcgttggtggagtttacttgttgccgcgcaggggccctagattgggtgtgcgcgcgacgaggaagacttccgagcggtcgcaacctcgtggtagacgtcagcctatccccaaggcacgtcggcccgagggcagggcctgggctcagcccgggtacccctggcccctctatggcaatgagggctgcgggtgggcgggatggctcctgtctccccgcggctcccggcctagttggggccccacggacccccggcgtaggtcgcgcaatttgggtaaggtcatcgataccctcacatgcggcttcgccgacctcatggggtacataccgctcgtcggcgcccctcttggaggcgctgccagggccctggcgcatggcgtccgggttctggaagacggcgtgaactatgcaacagggaatcttcctggttgctctttctctatcttccttctggctctgctctcttgcctgactgtgcccgcttcagcctaccaagtgcgcaactctacggggctttaccatgtcaccaatgattgccctaactcgagcattgtgtacgaggcggccgatgccatcctgcacactccggggtgtgtcccttgcgtccgcgagggtaactcctcgaggtgttgggtggcggtgacccccacggtggccactagggacggcaagctccccacaacgcagcttcgacgtcacatcgatctgcttgtcgggagcgccaccctctgctcggccctctacgtgggggacctgtgcgggtccgtctttcttgtcggtcagctgttcaccttctctcccaggcagcactggacgacgcaagactgcaattgttctatctatcccggccatataacgggtcaccgcatggcgtgggatatgatgatgaactggtcccctacggcggcattggtagtagctcagctgctccggatcccacaagccatcttggacatgatcgccggtgctcactggggagtcctggcgggcatggcgtatttctccatggtggggaactgggcgaaggtcttggtagtgctgctgctatttgccggcgtcgacgcgtacacccgcgtcactgggggaagtgccgcctacaccacgtctggtcttgctaggctgttccaaccaggcgcccagcagaacatccagctgatcaacaccaacggcagttggcacatcaatagcacggccttgaactgcaacgcaagccttgacaccggctggttagcaggacttttctattacagcaaattcaactcttcaggctgtcctgagaggttggccagctgccgaagccttgccgactttgaccagggctggggccccatcagccatgccaatggaagcggccccgaccaccgcccctactgctggcactaccccccaaaaccttgtggtattgtgcgcgcaaagagcgtgtgtggcccggtatattgcttcacccccagccccgtggtggtgggaacgaccgacagggcgggtgcgcctacctacaactggggcgcaaatgaaacggacgtcttcgtccttaacaacaccaggccaccgcggggcaattggttcggttgtacctggatgaactcaaccggattcaccaaagtgtgcggagcgcccccttgtgccatcggaggggtgggcaacaacaccttgcactgccccactgattgtttccgcaagcatccggaagccacgtactctcggtgcggttccggtccctggatcacacccaggtgcatggtccactacccgtataggctctggcattatccctgtaccatcaactacactttatttaaagtcaggatgtacgtgggtggggtcgagcacaggctggaagctgcctgcaactggacgcggggcgaacgttgtgatctggaagacagggacaggtccgagcttagcccgttgctgctgtccaccacacagtggcaggtcctcccatgttcctttacgaccctgccagccttgtccaccggcctcatccacctccaccagaacattgtggacgtgcagtatttgtacggggtggggtcaagcatcgcgtcctgggccattaaatgggagtacgtcgtcctcctgttccttctgctcgcagacgcacgcgtctgctcttgcttgtggatgatgttactcatatcccaagcggaggcggccttggagaacctcgtggtactcaatgcagcatccctggccgggacgcacggtcttgtacccttcctcgtgttcttctgctttgcgtggtacctgaagggtaggtgggtgcccggagcggtctacgccctctacgggatgtggcctctcctcctgctcctgttggcgttgccccagcgggcatacgcactggacacggaggtggccgcgtcgtgtggcggcgttgttcttgtcgggttgatggcgctgactctgtcaccatattacaagcactatatcagctggtgcatgtggtggcttcagtactttctgaccagagcagaagcgcaactgcacgtgtgggttccccctctcaacgttcgaggggggcgtgacgccgttatcttactcacgtgtgttgtacacccgactttggtatttgacatcaccaaactactcctggccgttatcgggcccctttggatccttcaagccagtttgcttaaagtaccctacttcgtgcgcgttcagggccttctccggatctgcgcactagcgcggaaaatggccggaggccattacgtgcaaatggccatcatcaagttaggggcgcttactggcacctatgtctacaaccatctcactccccttcgagactgggcgcacaacggcctgcgagatctggccgtggctgtggagccagtcgtcttctcccaaatggagaccaagctcatcacgtggggggcagacaccgccgcgtgcggtgacatcatcgacggcttgcccgtctccgcccgtaggggccgggagatattgctcgggccggccgatggaatggtctccaaggggtggaggttgctggcgcccatcacagcgtacgcccagcagacaaggggcctcctagggtgtataatcaccagcctgactggccgggacaaaaaccaagcggagggtgaggtccagattgtgtcaactgctgcccaaactttcctggcaacgtgcatcaatggggtatgctggactgtctaccacggggccggaacgaggaccattgcatcacccaagggtcctgttattcagatgtacaccaatgtggacaaagacctcgtgggctggcccgcccctcaaggtacccgctcattgacaccctgcacctgcggctcctcggacctttacctggtcacgaggcacgccgatgtcattcccgtgcgccggcgaggtgatagcagaggcagcctgctttcgccccggcccatttcctacttgaaaggctcctcggggggtccgctgttgtgccccgcggggcacgccgtgggcattttcagggccgcggtgtgcacccgtggagtggctaaagcggtggactttatccctgtggagaacctagagacaaccatgaggtccccggtgttctcggacaactcctctccaccagcagtgccccagagcttccaggtggctcacctgcatgctcccaccggcagcggtaaaagcaccaaggtcccggccgcatacgctgctcagggctacaaggtgctagtgctcaacccctctgttgccgcaacactggcctttggcgcttacatgtccaaggcccatggggtcgatcctaatgtcaggaccggggtgagaacaattaccactggcagcccaatcacgtactccacctacggcaagttccttgctgacggcgggtgctcggggggtgcctatgacataataatttgtgacgagtgccactccacggatgccacgtctatcttgggcatcggtactgtccttgaccaagcagagaccgcgggggcgaggctggttgtgctcgccaccgctacccctccgggctccgtcaccgtgccccatcctaacatcgaggaggttgctctgtccaccaccggagaggtccccttttacggcaaggctatccccctcgaggtaatcaagggggggagacatctcatcttctgtcactcaaaaaagaagtgcgacgagctcgccgcaaagctggtcgcgttgggcatcaatgccgtggcctactaccgtggccttgacgtgtccgtcatcccgaccagcggcgatgttgtcgtcgtggcgaccgatgctctcatgaccggctatactggcgacttcgactcggtgatagactgcaacacgtgtgtcacccaaacagtcgacttcagccttgaccctaccttcaccattgagacaaccacgctcccccaggatgctgtctcccgtactcaacgccggggcaggaccggcagggggaagtcaggcatctacagattcgtggcaccgggggagcgcccttccggcatgttcgactcgtccgtcctctgtgagtgctatgacgcgggctgtgcttggtatgagctcacgcccgctgagaccactgttaggctacgagcgtacatgaacaccccggggcttcctgtgtgccaggaccatcttgagttttgggagggcgtctttacaggcctcacccacatagatgcccactttctatcccagacaaagcagagtggggagaaccttccttacctggtagcgtaccaggccaccgtgtgcgctagggctcaagcccctcccccatcgtgggaccagatgtggaagtgtttgatccgcctcaagcccaccctccatgggccaacacctctgctatacagactgggcgctgttcagaatgaagtcaccttgacgcacccagtcaccaaatacatcatgacatgca

SEQ ID NO: 19 - DNA, 4905 bp, Hepatitis C virus
ccgcccacaggacgtcaagttcccgggcggtggtcagatcgttggtggagtttacctgttgccgcgcaggggccccaggttgggtgtgcgcgcgactaggaagacttccgagcggtcgcaacctcgtggaaggcgacaacctatccccaaggctcgccagcccgagggtagggcctgggctcagcctgggtacccttggcccctctatggcaatgagggcttggggtgggcaggatggctcctgtcaccccgtggctctcggcctagttggggccccacggacccccggcgtaggtcgcgtaatttgggtaaggtcatcgatacccttacatgcggcttcgccgacctcatggggtacattccgctcgtcggcgcccccttagggggcgctgccagggccctggcgcatggcgtccgggttctggaggacggcgtgaattatgcaacagggaatttgcccggttgctctttctctatcttccttttggctttgctgtcctgtttgaccatcccagtttccgcttatgaggtgcgcaacgtgtccggggtgtatcatgtcacgaacgactgctccaacgcaagcattgtgtacgaggcaacggacgtgatcatgcatacccccgggtgcgtgccctgcgttcgggagggcaatacctcccgctgctgggcggcgctcactcccacactcgcggccaggaattccagcgtcccgactacgacaatacgacggcacgtcgatttgctcgttggggcggctgctttctgttccgctatgtacgtgggggatctctgcggatctgtttttctcgtctcccagctgttcaccttctcgcctcgccggcatgagacggtacaggactgcaattgctcaatctatcccggccacgtatcaggtcaccgcatggcttgggatatgatgatgaactggtcacctacaacagccctagtggtatcgcagctactccggatcccacaagctgtcgtggacatggtggcgggggcccactggggagtcctggcgggccttgcctactattccatggtggggaactgggctaaggtcttaattgtgatgctactttttgccggcgtcgacgggagcacctacacgacagggggggcgctgggccgtaccacccacgggcttacgtccttcctttcaattgggccgtctcagaaaatccagcttataaataccaacggcagctggcacatcaacagaactgccttgaactgcaatgagtccctccacactggatggctcgccgcgttgttctacacaaacaagttcaacgcgtccggatgcccggagcgcatggccagctgccgccccattgacacgttcgatcaggggtggggtcccatcactcacgatgggcagggcagctcggaccagaggccctactgttggcactacgcaccccgaccgtgtggtattgtacccgcgtcggaggtgtgtggtccagtgtattgcttcaccccgagccccgttgtggtggggacgaccgatcgttccggcgtccctacgtatagctggggggggaatgagacggacgtgctgctcctcaacaacacgcggccgccgcaaggcaactggttcggctgtacatggatgaatagcactgggttcaccaaaacgtgcgggggccccccgtgtaacatcagggggagcggcaataacactttgacctgccccacggactgcttccggaagcaccccgaggccacttacaccaaatgcggttcggggccttggttgacacctaggtgcatggttgactacccatacaggctttggcactacccctgcactgtcaacttcaccatcttcaaggttaggatgtatgtggggggcgtggagcacaggctcaacgccgcgtgcaattggactcgaggagagcgttgtgatttggaggacagggatagatcagagcttagcccgctgctgctgtctacaacagagtggcagatactgccctgctccttcaccaccttaccggctctgtccactggtttgatccatctccatcagaacatcgtggacgtgcaatacctgtacggtatagggtcggcggttgtctcctttgcaatcaagtgggagtacatcgtgttgctcttccttctcctggcggacgcgcgcgtctgcgcctgcttgtggatgatgctactgatagctcaggccgaggctgccctagagaacctggtggttctcaatgcggcgtccgtggccggggcgcatggcctcctctcttttcttgtgttcttctgtgctgcctggtacatcaagggcaggttggtccctggggcggcgtatgccttgtacggcgtatggccgctactcctgctcctgttggcgttgccaccacgggcatacgccatggaccgggagatggctgcatcgtgcggaggcgcggtcttcataggtctggcactcttgaccttgtcaccacactataaagtgtttctcgcccggctcatatggtggttacaatatctcatcaccagagccgaggcgtgtttgcatgtgtggatccccccccttaacgttcgggggggccgcgatgccatcatcctcctcacgtgtatggtccacccagagctaatctttaccatcaccaagatcttgctcgccatactcggtccgctcatggtgctccaggctggtctaaccaaagtgccgtactttgtgcgtgctcaagggctcatccgtgtatgcatgttggtgcggaaagccgctgggggtcattacgtccaaatggctttcatgaggctggccgcgctgacgggtacgtacatctatgaccatcttaccccactgcgggactgggcccacgcgggcctacgagaccttgcggtggcggttgagcccgtcgtcttttctgacatggagaccaagatcatcacctggggggcggacaccgcagcatgcggggacatcatctcaggcctgcccgtttccgcccggagggggagagagatttttctgggaccggccgacggtcttgaagggcaggggtggcgactcctcgcgcctatcacggcctactcccaacagacacggggcctacttggttgtatcatcactagcctcacaggccgggacaagaaccaggtagagggggaggttcaagtggtttccactgcaacacaatctttcctggcgacctgcatcaacggcgtgtgttggactgtctaccatggtgccggctcaaagaccctagccggccctaagggcccaatcacccaaatgtacaccaatgtagaccaagacctcgttggctggcaagcgccctctggggcgcgctccttgacaccgtgcacctgcggcagctcggacctttacttggtcacgaggcatgctgatgtcataccggtgcgccggcggggcgacagcagggggagcttactctcccccaggcccgtctcctacttgaagggttcttcgggtggtccactgctttgcccctcggggcacgctgtaggcatcttccgggctgccgtgtgcacccggggggttgcgaaggcggtggacttcatacccgtcgaatctatggaaactaccatgcggtcgccggtcttcacggacaactcgtcccccccggccgtaccgcagacattccaagtggcccatctacacgcccccactggcagcggcaagagcaccaaggtgccggctgcatatgcagcccaagggtacaaggtacttgtcctgaacccgtccgtcgccgccactttaggtttcggggcgtatatgtccaaggcacatggtgtcgaccctaacattagaactggggtaaggaccatcaccacgggcgcccctattacgtactccacctacggcaagttccttgccgacggtggttgttctggaggcgcctatgacatcataatatgtgatgaatgccactcaactgactcgaccagcatcttgggcatcggcacagtcctggaccaagcggagacggctggagcgcggcttgtcgtgctcgccaccgctacgcctccgggatcagtcaccgtgccacatcccaatatcgaggaggtggctctgtccaacattggagagatccccttctacggcaaagccatccccatcgagaccatcaagggggggaggcatctcattttctgccattccaaaaagaaatgtgacgaactcgccgcaaagctgacgggccttggaatcaatgccgtagcatattacaggggcctcgatgtgtccgtcataccgaccagcggagacgtcgttgtcgtggcaacagacgctctaatgacgggctttactggcgattttgactcagtgatcgactgtaatacatgtgtcacccagacagtcgatttcagcttggaccctaccttcaccattgagaccacgaccgtgccccaagacgcggtgtcgcgctcacagcggcgaggcaggactggtaggggcaggacaggcatctacaggtttgtgactccaggagaacggccttcgggcatgttcgattcctcggtcctgtgtgagtgctatgacgcgggctgtgcttggtacgagctcacacccgccgagacctcagttaggctgcgggcttacctaaatacaccagggttgcccgtttgccaggaccatctggagttctgggagagcgtcttcacaggcctcacccacatagatgcccacttcttgtcccagactaaacaggcaggagacaactttccctacctggtagcataccaggctacggtgtgcgccagggcccaggctccacctccatcgtgggatcaaatgtggaagtgcctcatacggctaaagcctacgctgcacgggccaacacccctgctgtataggctaggagccgtccaaaacgaggtcaccctcacacaccccataaccaaatacatcatggcatgcatgtcggctga

SEQ ID NO: 20 - DNA, 4909 bp, Hepatitis C virus
caaccgtcgcccacaggacgttaagttcccgggtggcggtcagatcgttggtggagtttacttgttgccgcgcaggggccctagattgggtgtgcgcgcgacgaggaagacttccgagcggtcgcaacctcgcggtagacgtcagcctatccccaaggcgcgtcggcccgagggcaggacctgggctcagcccgggtacccctggcccctctacggcaatgagggctgcgggtgggcgggatggctcctgtccccccgtggctctcggcctagctggggccccacagacccccggcgtaggtcgcgcaatttgggtaaggtcatcgacaccctcacgtgcggcttcgccgacctcatggggtacattccgctcgtcggcgcccctcttgggggcgctgccagggccctggcgcatggcgtccgggtcctggaagacggcgtgaattatgcaacagggaaccttcctggttgctctttttctatcttccttctggccctgctctcttgcctgaccgtgcccgcgtcggcctatcaagtacgcaactcctcgggcctctaccatgtcaccaatgattgccctaactcgagtattgtgtacgagacggccgataccattctacattctccggggtgtgtcccttgcgttcgcgagggtaacgcctcgaaatgttgggtggcggtggcccccacagtcgccaccagggatggcagactccccacaacgcagcttcgacgtcacatcgatctgcttgtcgggagcgccaccctctgctcggccctctatgtgggggacttgtgcgggtctgtcttccttgtcggtcaactgttcactttctcccccaggcgccactggacaacgcaagactgcaactgttctatctaccccggccatataacgggtcaccgcatggcatgggatatgatgatgaactggtcccctacagcagcgctggtagtagctcagctgctcagggtcccgcaagccatcttggacatgatcgctggtgcccactggggagtcctagcgggcatagcgtatttctccatggtggggaactgggcgaaggtcttagtggtgctgttgctgtttgccggcgttgatgcgggaacccacatcaccggggggagtgtcgctcattccacggcacgactcaccggtcttttcagtcgtggctcccagcagcatatccagctgatcaacaccaacggcagttggcacatcaatcgcacggccctgaactgtaatgaaagcctcaacactggctggctagcggggctcttctattccaacaaattcaactcttcaggctgccccgagaggttggccagctgtagaccccttgccgatttcgaccagggctggggtcctatcagctacgccaacggaagcggccccgaccaccggccctactgctggcactaccccccaaagccttgtggtatcgtgccagcacagagcgtatgtggcccagtgtattgcttcacacccagccccgtggtggtgggaacgaccaacaagttgggcgcgcctacctacaactggggttgcaatgatacggacgtcttcgtccttaataacaccaggccgccgttgggcaattggttcggttgcacctggatgaactcatctggatttaccaaagtgtgcggagcgcctccttgtgtcatcggaggggggggcaacaacaccttgcactgccccactgactgtttccgcaagcatccggaagccacatactctcggtgtggctccggtccctggatcacgcccaggtgcctggtccactatccttataggctttggcattatccttgtactgtcaactacaccatgttcaaagtcaggatgtacgtgggaggggtcgagcacaggctggacgttgcttgcaactggacgcggggcgagcgttgcgatctggacgacagggacaggtccgagctcagcccgctgctgctgtccaccacacagtggcaggtccttccgtgttcctttaccaccttgccagccttgactaccggcctcatccacctccaccagaacatcgtggatgtgcaatacttgtacggggtggggtcaagcattgtgtcctgggccatcaagtgggaatacgtcatcctcttatttctcctgcttgcagacgcgcgcatctgctcctgcttgtggatgatgctactcatatcccaagcggaggcagcgttggagaaccttgtgttgctcaacgcggcgtctctggccgggacgcatggccttgcgtccttcctcgtgtttttctgctttgcatggtatctgaagggtaagtgggcgcccggagcagcctacgccttctacgggatgtggcctctcctcctgctcctgttggcgttgccccagcgggcatacgcgctggacacggagatggccgcgtcgtgtggcggcgttgttattgtcgggttaatggcgctgactctgtcaccgcactacaagcgctacatcagctggtgcttatggtggcttcagtatttcttgaccagagtagaagcgcaactgcacgtgtgggttccccccctcaacgtccggggggggcgtgacgctgtcatcctactcatgtgtgctgtacacccggctttggtatttgacatcaccaagctgctgttggccgtcttcggccctctttggattcttcaaaccagtctgctcaaagtgccctatttcgtgcgcgttcaaggccttctccggatctgcgcgctagcgcgcaagatggccggcggccattacgtgcaaatggccatcatcaagatgggggcgcttactggcacctatgtttataaccatctcactcctcttcgggactgggcgcacaacggcctacgagatctggccgtggctgtagagccagtcgtcttctcccagatggagaccaagctcatcacgtggggggcggacaccgccgcgtgcggtgacatcatcaacggcttgcccgtctctgcccgtaggggccgagagatactgctcggaccggccgatggaatggtctccaaggggtggaggttgctggcgcccatcacggcgtatgcccagcagacaaggggcctcttgggatgcataataaccagcctgaccggccgggacaaaaaccaggtggagggtgaggttcagattgtgtcaactgctgcccagacctttctggcaacctgcatcaacggggtgtgctggactgtctaccacggggccggaacaaggaccatcgcatcacccaaaggtcctgttatccagatgtacaccaatgtagaccaagacctcgtaggctggcccgctccccaaggtgcccgctcattgacaccctgcacttgcggctcctcggacctttacctggtcacgaggcacgccgatgtcattcccgtacgccgacggggtgatagcaggggcagcctgctttcgccccggcctatctcttacttgaaaggctcctcggggggtccactactgtgccccgcgggacacgccgtaggcatattcagggccgcggtgtgcacccgtggagtggctaaggcggtggactttatccccgtagagagcctagagacaaccatgaggtccccggtgttcacagacaattcctccccaccagcagtgccccagagcttccaggtggctcacctgcatgctcccaccggcagcggtaagagcaccaaggtcccggccgcatacgcggctcaggggtacaaggtgttggtgctcaacccctccgttgctgcaacactgggttttggtgcctacatgtccaaggcccatggggttgatcctaacatcaggactggggtgaggacaattactactggcagctccatcacgtactccacctacggcaagttcctcgccgacggcgggtgctcggggggtgcttatgacataataatttgtgacgagtgccactccacggatgcaacatctatcttgggcatcggcaccgtccttgaccaagcagagactgcgggggcgagactggttgtgctcgccaccgctactcctccgggctccgtcaccgtgccccatcctaacatcgaggaggttgctctgtctaccaccggagagatccccttttacggcaaggctatcccccttgaggcaatcaagggagggagacatctcattttctgccactcaaagaagaagtgcgacgagctcgccgcaaaactggtcgcgatgggcatcaatgccgtggcttactaccgcggccttgacgtgtccgtcatcccgaccagtggcgacgttgtcgttgtggcaactgatgctctcatgaccggctataccggcgacttcgactcggtgatagactgcaacacgtgtgtcacccagacagtcgacttcagccttgaccctaccttcaccattgagacaaccacacttcctcaggacgctgtctcccgcacccaacgtcggggcaggactggcagggggaagccaggcatctacagatttgtggcaccgggagagcgcccttccggcatgttcgactcgtccgtcctctgtgagtgctatgacgcaggctgtgcttggtatgagctcacacccgccgagaccacagtcaggctacgagcatacatgaacactccggggcttcccgtgtgccaagaccatcttgaattttgggagggcgtcttcacgggtctcacccatatagacgcccacttcctatctcagacaaagcagagtggggaaaactttccttacctggtagcgtaccaagccaccgtgtgcgctagagctcaagctccccccccatcgtgggaccagatgtggaagtgcttgatccgcctcaaacccaccctccatgggccaacacctctgctatacaggctgggcgcggttcagaatgaagtcaccctgacgcacccaatcaccaagtacatcatgacatgcatgtcggct

SEQ ID NO: 21 - DNA, 4909 bp, Hepatitis C virus
caaccgtcgcccacaggacgtcaagttcccgggtggcggtcagatcgttggtggagtttatttgttgccgcgcaggggccctagattgggtgtgcgcgcgacgaggaagacttccgagcggtcgcaacctcgaggtagacgtcagcctatccccaaggcgcgtcggcccgagggcaggacctgggctcagcccgggtacccttggcccctctatggcaatgagggctgcgggtgggcgggatggctcctgtccccccgtggctctcggcctagctggggccccacagacccccggcgtaggtcgcgcaatttgggtaaggtcatcgataccctcacgtgcggcttcgccgacctcatggggtacattccgctcgtcggcgcccctcttggaggcgctgccagggccctggcgcatggcgtccgggttctggaagacggcgtgaactatgcaacagggaatcttcccggttgctctttctctatcttccttctggctctgctctcttgcctgaccgtgcccgcgtcggcctaccaagtacgcaactcctcgggcctttatcatgtcaccaatgattgccccaactcgagtattgtgtacgagacggccgataccatcctacattctccggggtgtgtcccttgcgttcgcgagggtaacacctcaaaatgttgggtgccagtgtcccccacagtggccaccagggacggcaaactccccgcgacgcagcttcgacgtcacatcgatctgcttgtcgggagtgccaccctctgttcagccctatatgtgggggacttgtgcgggtctgtctttcttgtcggtcaactgttcactttctcccccaggcgccactggacaacgcaagactgcaactgctctatctaccccggccatataacgggtcaccgcatggcatgggatatgatgatgaactggtcccctacaacagcgctggtagtagctcagctgctcagggttccgcaagccatcttggatatgatcgcgggtgcccactggggggtcctagcgggcatagcgtatttttccatggtggggaactgggcgaaggtcctggtagtgctgttgctgtttgccagcgtcgatgcggaaacccgcaccaccggggggagtgctgctcacaccacgtttggactcgccagtttattcaatccgggccccagccagaaaatccagctgattaacagcaacggcagttggcacatcaatcgcacagccttgaactgtaatgcgagcctcgacactggctgggtggcggggctcctctattaccacaagttcaactcttcgggctgcaccgagaggatggccagctgtagaccccttgccaatttcgcccagggctggggccctatcagctacgccaacggaagcggccccgaacaccgcccctactgctggcactaccctccaaaaccttgtggtatcgtgccagcgctgaatgtatgtggcccagtgtactgcttcactcccagccccgtggtagtggggacgaccgacaagttgggcgcgcccacctacaaatggggtgccaatgagacggacgtcttcattcttaataacaccaggccaccgttgggcaattggtttggttgcacctggatgaattcatctggatttaccaaagtgtgcggagcgcctccttgtaacatcggagggatgggcaacaacaccttgcactgccccactgattgtttccgcaagcatccggaagccacatactctcggtgtggctccggcccctggctcacgcccaggtgcttggtccactatgcttataggctttggcattatccttgtaccgtcaactacaccatgttcaaagtcaggatgtacgtgggaggggtcgagcacaggctggacgtggcctgcaactggacgcggggcgaaccttgtgatctggacgacagggacaggtccgagctcagcccgctgctgctgtccaccacacagtggcaggtccttccgtgctccttcacgaccctgccagccttgactaccggcctcatccacctccaccagaatatcgtggacgtgcaatacttgtacggggtggggtcgagcattgtgtcctgggccatcaagtgggagtacgtcatcctcttgtttctcctgcttgcagacgcgcgcatctgctcctgcttgtggatgatgttgctcatatcccaagcggaggcagctttggaaaatcttgtattgctcaatgcggcgtctctggccgggacgcacggtcttgtgtccttcctcgtgtttttctgctttgcatggtatctgaagggtaggtgggtgcccggggtggcctacgcctgctacgggatgtggcccttcctcctgctcctgttggcgttgccccaacgggcatacgcgctggacacggagatggccgcgtcgtgtggcggcattgttcttgccgggttaatggcgctgactctgtcaccgcattacaagcgctatatcagctggtgcttatggtggcttcagtatttcctgactagagtagaagcgcaactgcacgtgtgggttccccccctcaacgttcgaggggggcgcgacgctgtcatcctactcatgtgtgttgtacacccggctttggtatttgacatcaccaagctactgctggctgtcttcggacccctttggattcttcaggccagtctgctcaaagtgccctacttcgtgcgcgttcaaggccttctccggatctgcgcgctagtgcgcaaggtggccggaggccattacgtgcagatggtcatcatcaagatgggggcgcttgttggcacttatgtctataaccatctcactcctcttcgggactgggcgcacaacggcctgcaagatctggccgtggctgtagagccagtcgtcttctcccaaatggagaccaagctcatcacgtggggggcggacaccgccgcgtgcggtgacatcatcgacggcttgcccgtctccgcccgcaggggccgagagatactgctcggaccggctgatgggatggtctcaaaggggtggaggttgctggcgcccatcacggcgtatgcccagcagacaaggggcctcttgggatgcataatcaccagcctgaccggccgggacaaaaaccaggtggagggtgaggttcaaattgtgtcaactgctacccagaccttcctggcgacctgcatcaacggggtgtgctggactgtctaccacggggccggaacaaggaccatcgcgtcgcccaagggccctgtcatccaaatgtataccaatgtggaccaagatctcgtaggctggcccgctccccaaggcgcccgctcattgacaccctgcgcttgtggctcctcggacctttacctggtcacgaggcacgccgatgtcattcctgtgcgcaggcggggtgatagcagaggcagcctgctttcgccccggcccatctcttacttgaaaggctcctcggggggcccgctgctgtgccccgcgggacacgccgtaggcatattcagagctgcggtgtgcactcgtggagtggccaaggcggtggacttcatccccgtagagagcttggaaacaaccatgaggtctccggtgttcacagacaactcttctccaccagcagtgccccagtgcttccaagtggcccacctacatgctcccaccggcagcggtaagagtaccaaggtcccggccgcgtacgcggctcagggctacaaggtgctggtgctcaacccctccgttgctgcaacgctgggctttggtgcttacatgtccaaggcccatgggattgatcctaacatcaggactggggtgaggacaattactactggcagccccatcacgtactccacctacggcaagtttcttgccgacggcgggtgctcagggggcgcttatgacataataatttgtgacgagtgccactccacggatgcaacatccatcttgggcatcggcactgtccttgaccaagcagagactgcgggggcgagactggttgtgctcgccaccgctacccctccgggttccgtcaccgtgccccaccctaacatcgaggaggttgctctgtccaccaccggagagattcctttttatggcaaggctatcccccttgagacaatcaagggggggagacatctcattttttgccactcaaagaagaagtgcgacgagctcgctgcaaagctggtcgcgatgggcgtcaacgccgtggcctactaccgcggccttgacgtgtccgtcatcccgaccagcggcgatgttgtcgtcgtggcaactgatgctctcatgaccggctttaccggcgacttcgactcggtgatagattgcaacacgtgtgtcacccagacagtcgacttcagccttgatcctaccttcaccattgagacgaccacgctcccccaggacgccgtctcccgcactcaacgtcgggggaggactggcagggggaagccaggcatctacagatttgtggcaccgggggaacgcccttccggcatgttcgactcgtccgtcctctgcgagtgctatgacgcgggctgtgcttggtatgaactcacacccgccgagaccacagttaggctgcgagcgtacatgaacaccccggggctccccgtgtgccaagaccatcttgaattttgggagggcgtctttacgggtctcacccacatagacgcccacttcctatctcagacaaagcagagtggggaaaaccttccttacctggtagcgtaccaagccaccgtgtgcgctagggcccaagcccctcctccatcgtgggaccaaatgtggaagtgcctgatccgcctcaagcccacccttcatgggccgacacctctgctatacagactgggtgctgttcagaatgaggtcaccctgacacacccagtcaccaagtacatcatgacatgcatgtcggct

SEQ ID NO: 22 - DNA, 4910 bp, Hepatitis C virus
acaccaaccgtcgcccacaggacgtcaagttcccgggtggcggccagatcgttggtggagtttacttgttgccgcgcaggggccctagattgggtgtgcgcgcgacgaggaagacttccgagcggtcgcaacctcgaggtagacgtcagcctatccccaaggcgcgtcggcccgagggcaggacctgggcccagcccgggtacccttggcccctctatggcaatgagggctgcggatgggcgggatggctcctgtccccccgtggctctcggcctagctggggccccacagacccccggcgtaggtcgcgcaatttgggtaaggtcatcgataccctcacgtgcggcttcgccgacctcatggggtacattccgctcgtcggcgcccctctcggaggcgctgccagggccctggcgcatggcgtccgggttctggaagacggcgtgaactatgcaacagggaaccttcctggttgctctttctctatcttccttctggccctgctctcttgcctgactgtgcccgcatcagcctatcaagtacgcaactcttcgggcctctaccatgtcaccaatgattgccctaactcgagtattgtgtacgagacggccgataccatcctacactctccggggtgtgtcccttgcgttcgcgagggtaacgcctcgaaatgttgggtggctgtggcccccacggtcgccaccagggacggcaagctccccgcaacgcagcttcgacgtcacatcgatctgcttgtcgggggcgccaccctctgctcggccctctacgtgggggacttgtgcgggtccatctttcttgtcggccaactgttcacgttctcccccaggcgccactggacaacgcaagactgcaactgttctatctaccccggccacataacgggtcatcgcatggcatgggatatgatgatgaactggtcccctacaacagcgctggtagtagcccagctgctcagggttccacaagccatcttggatatgatcgctggtgctcactggggtgtcctagcgggcatagcgtatttttccatggtggggaactgggcgaaggttctggtggtgctgctgctgtttgccggcgtcgatgcggcaacctacaccaccgggggagctgctgccaggaccgcgtccacgttcgccggccttttcgatacgggcgccaagcagaatatccagctgatcaacaccaacggcagttggcacatcaatcgcacggccttgaattgtaatgcgagcctcgacactggctgggtagcggggctcttctattaccaaaaattcaactcctcaggctgccccgagaggatggccagctgtaagcccctcgccgatttcgaccaaggctggggccctatcagctacgccaacggaagcggccccgaacaccgcccctactgctggcactaccccccaaagccttgtggtatcgtgccagcgcagaacgtatgtggcccagtgtattgcttcactcctagccccgtggtggtgggaacaaccgacaagcggggtgcgcctacctacaactggggtggcaatgacacggacgtcctcgtccttaataacaccaggccaccgctgggcaattggttcggttgcacctggatgaactcatctggatttaccaaagtgtgcggagcgcctccttgtgtcatcggaggagtgggcaacaacaccttgcactgccccactgactgtttccgcaagcatccagaggccacatactctcggtgtggctccggtccctggatcacgcccaggtgcatggtccactatccttacaggctttggcattatccttgcaccgtcaactacaccgtgttcaaagtcaggatgtacgtgggaggggtcgagcacaggctggaagttgcttgcaactggacgcggggcgagcgttgtgatctggacgacagggacaggtccgagctcagcccgctactgctgtccaccacacagtggcaggtccttccatgctccttcacgaccttgccagccttgaccaccggcctcatccacctccaccagaacatcgtggacgtgcaatatttgtacggggtggggtcaagcatcgtgtcctgggccatcaagtgggagtatgtcatcctcttgtttctcctgcttgcagatgcgcgcatctgctcctgcttgtggatgatgctactcatatcccaggcggaagcagctttggagaacctcgtggtgctcaatgcggcgtctctggccgggacgcatggtcttgtgtccttcctcgtgttcttctgctttgcatggtacctgaggggtaagtgggtgcccggagcggcctacgccttctacgggatgtggcctctcctcctgctcctgttggcgttgccccagcgggcatacgcgctagacacggagacgaccgcgtcgtgtggcggcattgttcttgtcgggttaatggcgctgactctgtcaccgcattacaagcgctatgtcagctggtgcttatggtggcttcagtatttcctgaccagagtagaagcgcaactgcacgtgtgggtcccccccctcaacgtccggggggggcgtgacgctgtcatcttactcacgtgtgtcgtacacccggccttggtatttgacatcaccaagctgctgctggccgtcttcggacccctttggattcttcaaaccagcctgctcaaagtgccctacttcgtgcgcgtccaaggccttctccggatctgcgcgctagtgcgcgagatggccggaggccattacgtgcagatggccatcatcaagatgggggcgcttactggcacctatgtttataaccatctcacccctcttcgggactgggcgcacaacggcctacgagatctggccgtggctgtggagccagtcgtcttttcccagatggagaccaagctcattacgtggggggcggacaccgccgcatgtggtgacatcatcaacggcttgcccgtctccgcccgtaggggccgagagatattgctcggaccggccgacgggatggtctctaaagggtggaggttgctggcgcctatcacggcgtacgcccagcagacaaggggcctcttggggtgcataattaccagcctgaccggccgggacaaaaaccaggtggagggtgaggtccagattgtgtcaactgctgcccagaccttcctggcaacctgcatcaacggggtgtgctggactgtctaccacggagccggaacaaggaccatcgcgtcacccaggggtcctgttatccagatgtacaccaatgtagaccaagacttagtaggctggcccgctccccaaggtgcccgctcattgacaccctgcacttgcggctcctcggacctttacctggtcacgaggcacgccgatgtcattcccgtgcgccggcggggtgacagcagaggcagtctgctttcgccccggcccatctcttacttaaaaggctcctcggggggcccactgctgtgccccgcgggacacgccgtaggcatattcagagccgcggtgtgcacccgtggagtggctaaggcggtggacttcatccccgtagagaacctagagacaaccatgaggtccccggtgttcacagacaactcctctccaccagcagtgccccagagcttccaggtggcccacctgcatgctcccaccggcagcggtaagagcaccaaggtcccggccgcatatgctgctcagggctacaaggtgctggtgctcaacccttccgttgcagcaacattgggctttggtgcttatatgtccaaggcccatgggattgatcctaacatcaggactggggtgaggacaattaccactggcagccccatcacgtactccacctatggcaagtttcttgccgacggcgggtgctcggggggtgcttatgacataataatttgtgacgagtgccactccacggatgcaacatccatcttgggcatcggcaccgtccttgaccaagcagagactgcgggggcaagactggttgtgcttgccaccgccacccctccgggctccgtcaccgtgccccatcataacatcgaggaggttgctctgtccaccaccggagagatccccttctatggcaaggctattccccttgagacaatcaagggggggagacatctcatcttctgccattcaaagaagaagtgcgacgagctcgccgcgaaactggccgcgttgggcgttaatgccgtggcttactaccgcggccttgacgtgtccgtcatcccgaccagtggcgatgttgtcgtcgtggcaactgatgcactcatgaccggctataccggcgacttcgactcggtgatagactgcaatacgtgtgtcacccagacagtcgacttcagccttgaccctaccttcaccattgagacaaccacgcttccccaggatgctgtctcccgcactcaacgtcggggcaggactggcagggggaagccaggcatctacagatttgtggcaccgggggagcgcccttccggcatgttcgactcgtccgtcctctgtgagtgctatgacgcgggctgtgcttggtatgagctcacacccgctgagaccacagttaggctacgagcgtacatgaacaccccgggactccctgtgtgccaagaccatcttgagttttgggaaggcgtcttcacgggtctcacccatatagacgcccacttcttatcccagacaaagcagagtggagaaaactttccttacctggtagcgtaccaagccaccgtgtgcgctagagcccaagcccctcccccatcgtgggaccagatgtggaagtgtttgatccgtctcaagcccaccctgcatgggccaacacctctgctatacagactgggcgctgttcagaatgaaatcaccctgacgcacccggtcaccaagtatatcatgacatgcatgtcg

SEQ ID NO: 23 - DNA, 4853 bp, Hepatitis C virus
tcgcccacaggacgttaagttcccgggtggcggtcagatcgttggtggagtttacttgttgccgcgcaggggccctagaatgggtgtgcgcgcgccgaggaagacttccgagcggtcgcaacctcgagtagacgtcagcctatccccaaggcacgtcggcccgagggcaggacctgggctcagcccgggtacccttggcccctctatggcaatgagggctgcgggtgggcgggatggctcctgtccccccgcggtctcggcctagttggggccccacagacccccggcgtaggtcgcgcaatttgggtaaggtcatcgacacccttacgtgcggcttcgccgacctcatggggtacataccgctcgtcggcgcccctcttggaggcgctgccaggccctggcgcatggcgttcgggttctggaagacggcgtgaactatgcaacagggaaccttcctggttgctctttctctatcttctttctggccctgctctcttgtctgactgtgcccgcttcggcctacaagtgcgcaactctacagggctctaccacgtcaccaatgattgccctaactcgagtattgtgtacgaggcgcctgatgccatcctgcacactccggggtgtgtcccttgcgttcgcgagggtaacgcctcgaggtgttggtggcgatgacccccacggtggccaccagggacggcaaactccccgcgacgcagcttcgacgtcacatcgatctgcttgtcgggagcgccaccctctgttcggctctttacgtgggggacctgtgcggtctgtctttcttgtgggtcaactgtttaccttctcccccaggcgccactggacgacgcaagactgcaattgctctatctatcccggccatataacgggtcaccgcatggcatgggatatgatgatgaactggtccccgacgcggcgttggtaatggctcagctgctccggatcccgcaagccatcttggacatgatcgctggtgcccactggggagtcttggcgggcatagcgtatttctccatggtggggaactgggcgaaggtcctgtagtgctgctgctattcgccggcgtcgacgcggaaaccatgaccaccgggggggccgccgctcgcaacgtgtatagaatttccagcttcttctcgccgggcccccagcagaacatccagctgatcaacaccaacggcagtggcacatcaataggacggccttgaactgcaacgacagccttaacaccggctggttagcagggcttttctatcatcgcagcttcaactcttcaggctgtcctgcgaggctggccagctgccgacgcctaccgactttgcccagggctggggccctatcagccatgccaacggcagcggccccgaccaacgcccctactgttggcactaccccccaaaaccttgcggtattgtgcccgcacggaacgtgtgtggcccggtatattgcttccccccagtcccgtggcggtgggaacgaccgacagggcgggcgtccctacctaccgctggggtgaaaatgaaacggacgtcttcgtccttaacaacaccaggccaccgctgggcaattggttcggttgacctggatgaattcaactggattcaccaaagtgtgcggagcgcctccttgtgtcatcggaggagtgggcaacgacaccttgtactgccccactgattgtttccgcaagcatccggaagccacatattcccggtgcggctccgtccctggattacacccagatgcctggttgactacccgtataggctttggcattatccttgtaccgtcaactacaccatattcaaagtcaggatgtatgtgggaggggtcgagcataggctggatgcgcctgcaactggacgcggggcgaacgttgcgatctggaagacagggacaggtccgagctcagcccgttgctgctgtccactacacagtggcaggtccttccgtgctccttcacgaccttgccagccttgtccaccggcctctccacctccaccagaacattgtggacgtgcagtacctgtacggggtagggtcaagcatcgcgtcctgggccattaagtgggagtacgtcgttctcctgttccttctgcttgcagacgcgcgcgtctgtcctgcctgtggatgatgctactcatatcccaagcggaggcggctttggagaacctcgtaatactcaatgcagcatccctggccgggacgcaaggtcttgtatccttcctcgtgttcttctgctttgcgtggtatctgaaggtaggtgggtgccaggagcggtttacgccctctacggaatgtggcctctcctcctgctcctgttggcgttgccccagcgggcatacgcgctggacacggaggtggccgcgtcgtgtggcggcgttgtcttgtcgggttgatgatgctgactctgtcaccgtattacaagcgctatatcagctggtgcttatggtggcttcagtattttctgactagggcagaagcgcaactgcacgtgtgggttccccccctcaacgttcgagggggggcgacgctgccatcttactcacatgcgttgtacacccgactctggtatttgacatcaccaaactactgctggctgtcctcggacccctttggattcttcaagccagtttgcttaaagtaccctacttgtgcgcgtccaaggccttctccggatctgcgcgttagcgcggaagatggtcggaggccactacgtgcaaatggttatcatcaagttagggatgcttactggcacctatgtttataaccatctcacccccctccgggactggcgcacaacggcctgcgagatctggccgtggctgtagaaccagtcgtcttctcccaaatggagaccaagctcatcacgtggggggcagacactgccgcgtgcggtgacatcatcaacggcttgcccgttccgcccgtaggggccaggagatactgctcggaccagccgatggaatggtctccaaggggtggaggttgctggcgcccatcacggcgtacgcccagcagacaaggggcctcctagggtgcataatcaccagcctaaccggcgggataaaaaccaagtggagggtgaggtccagattgtgtcaactgctgcccaaactttcctggcaacgtgcatcagtggggtatgctggactgtctaccacggggccggaacgaggactattgcatctccaaaggccctgttatccagatgtataccaatgtggacaaagaccttgtgggctggcccgctcctcaaggtgcccgctcattgacaccctgcacctgcggctcctcggacctttacctggtcacgaggcatgccgatgtctccccgtgcgccggcggggtgatagcaggggcagcctgctctcgccccggcccatttcctatctgaaaggctcctcggggggcccgctgttgtgccccgcgggacacgccgtaggcatattcagggcgcggtgtgcacccgtggagtggctaaggcggtggactttatccctgtggagaacctagagacaaccatgaggtccccggtgttcacggacaactcctctccgccagcagtgccccagagcttccaggtggcccacctgcatctcccacaggcagcggcaagagcaccaaggtcccggctgcgtatgcggctcagggctataaggtgctagtactcaacccctctgtcgctgcaacactgggctttggtgcttatatgtccaaggcccagggatcgatcctaatatcaggaccggggcgagaacaattaccactggcagccccatcacgtactccacctacggcaaatttcttgccgacggcgggtgctcggggggcgcttatgatataataatttgtgacgagtgccatccacggatgccacatccatcttgggcatcggcactgtccttgaccaggcagagaccgcgggggcgagactggttgtgctcgccaccgccacccctccgggctccgtcactgtgccccatcctaacatgaggaggttgctctgtccaccaccggagagattcctttctatggcaaggctatccccctcgaagtaatcaaaggggggagacatctcattttttgtcactcaaagaagaagtgcgacgagctcgccgcaaagctagtcgcatgggcatcaatgccgtggcctactaccgcggtcttgacgtgtccgtcatcccgaccagcggcgatgttgtcgtcgtggcaactgatgctctcatgaccggctttaccggcgacttcgactcggtgatgactgcaacacgtgtgtcacccagacggtcgacttcagccttgaccctactttcaccattgagacaaccacgcttccccaggatgctgtctcccgcactcaacgtcggggtaggactggcagggggaagccaggcatctacgatttgtggcaccgggggagcgcccctccggcatgttcgactcgtccatcctctgtgagtgctatgacgcgggctgtgcttggtatgagctcacgcccgccgagactacagttagactacgagcgtaatgaacaccccggggcttcccgtgtgccaagaccatcttgaattttgggagggcgtcttcacaggcctcactcatatagatgcccacttcctatcccaaacaaagcagagtggggagaatcttccttacctggtagcgtacaagccaccgtgtgcgctagggctcaagcccctcccccatcgtgggaccagatgtggaagtgtttgatccgcctcaaacccaccctccatgggccaacacctctgctatacagactgggcgctgtccaaatgaggtcaccctgacgcacccagtcaccaaatacattatga

SEQ ID NO: 24 - DNA, 4853 bp, Hepatitis C virus
tcgcccacaggacgttaagttcccgggtggcggtcagatcgttggtggagtttacttgttgccgcgcaggggccctagaatgggtgtgcgcgcgccgaggaagacttccgagcggtcgcaacctcgagtagacgtcagcctatccccaaggcacgtcggcccgagggcaggacctgggctcagcccgggtacccttggcccctctatggcaatgagggctgcgggtgggcgggatggctcctgtccccccgcggtctcggcctagttggggccccacagacccccggcgtaggtcgcgcaatttgggtaaggtcatcgacacccttacgtgcggcttcgccgacctcatggggtacataccgctcgtcggcgcccctcttggaggcgctgccaggccctggcgcatggcgttcgggttctggaagacggcgtgaactatgcaacagggaaccttcctggttgctctttctctatcttctttctggccctgctctcttgtctgactgtgcccgcttcggcctacaagtgcgcaactctacagggctctaccacgtcaccaatgattgccctaactcgagtattgtgtacgaggcgcctgatgccatcctgcacactccggggtgtgtcccttgcgttcgcgagggtaacgcctcgaggtgttggtggcgatgacccccacggtggccaccagggacggcaaactccccgcgacgcagcttcgacgtcacatcgatctgcttgtcgggagcgccaccctctgttcggctctttacgtgggggacctgtgcggtctgtctttcttgtgggtcaactgtttaccttctcccccaggcgccactggacgacgcaagactgcaattgctctatctatcccggccatataacgggtcaccgcatggcatgggatatgatgatgaactggtccccgacgcagcgttggtaatggctcagctgctccggatcccgcaagccatcttggacatgatcgctggtgcccactggggagtcttggcgggcatagcgtatttctccatggtggggaactgggcgaaggtcctgtagtgctgctgctattcgccggcgtcgacgcggaaaccatgaccaccgggggggccgccgctcgcaacgtgtatagaatttccagcttcttctcgccgggcccccagcagaacatccagctgatcaacaccaacggcagtggcacatcaataggacggccttgaactgcaacgacagccttaacaccggctggttagcagggcttttctatcatcgcagcttcaactcttcaggctgtcctgcgaggctggccagctgccgacgcctaccgactttgcccagggctggggccctatcagccatgccaacggcagcggccccgaccaacgcccctactgttggcactaccccccaaaaccttgcggtattgtgcccgcacggaacgtgtgtggcccggtatattgcttccccccagtcccgtggcggtgggaacgaccgacagggcgggcgtccctacctaccgctggggtgaaaatgaaacggacgtcttcgtccttaacaacaccaggccaccgctgggcaattggttcggttgacctggatgaattcaactggattcaccaaagtgtgcggagcgcctccttgtgtcatcggaggagtgggcaacgacaccttgtactgccccactgattgtttccgcaagcatccggaagccacatattcccggtgcggctccgtccctggattacacccagatgcctggttgactacccgtataggctttggcattatccttgtaccgtcaactacaccatattcaaagtcaggatgtatgtgggaggggtcgagcataggctggatgcgcctgcaactggacgcggggcgaacgttgcgatctggaagacagggacaggtccgagctcagcccgttgctgctgtccactacacagtggcaggtccttccgtgctccttcacgaccttgccagccttgtccaccggcctctccacctccaccagaacattgtggacgtgcagtacctgtacggggtagggtcaagcatcgcgtcctgggccattaagtgggagtacgtcgttctcctgttccttctgcttgcagacgcgcgcgtctgtcctgcctgtggatgatgctactcatatcccaagcggaggcggctttggagaacctcgtaatactcaatgcagcatccctggccgggacgcaaggtcttgtatccttcctcgtgttcttctgctttgcgtggtatctgaaggtaggtgggtgccaggagcggtttacgccctctacggaatgtggcctctcctcctgctcctgttggcgttgccccagcgggcatacgcgctggacacggaggtggccgcgtcgtgtggcggcgttgtcttgtcgggttgatgatgctgactctgtcaccgtattacaagcgctatatcagctggtgcttatggtggcttcagtattttctgactagggcagaagcgcaactgcacgtgtgggttccccccctcaacgttcgagggggggcgacgctgccatcttactcacatgcgttgtacacccgactctggtatttgacatcaccaaactactgctggctgtcctcggacccctttggattcttcaagccagtttgcttaaagtaccctacttgtgcgcgtccaaggccttctccggatctgcgcgttagcgcggaagatggtcggaggccactacgtgcaaatggttatcatcaagttagggatgcttactggcacctatgtttataaccatctcacccccctccgggactggcgcacaacggcctgcgagatctggccgtggctgtagaaccagtcgtcttctcccaaatggagaccaagctcatcacgtggggggcagacactgccgcgtgcggtgacatcatcaacggcttgcccgttccgcccgtaggggccaggagatactgctcggaccagccgatggaatggtctccaaggggtggaggttgctggcgcccatcacggcgtacgcccagcagacaaggggcctcctagggtgcataatcaccagcctaaccggcgggataaaaaccaagtggagggtgaggtccagattgtgtcaactgctgcccaaactttcctggcaacgtgcatcagtggggtatgctggactgtctaccacggggccggaacgaggactattgcatctccaaaggccctgttatccagatgtataccaatgtggacaaagaccttgtgggctggcccgctcctcaaggtgcccgctcattgacaccctgcacctgcggctcctcggacctttacctggtcacgaggcatgccgatgtctccccgtgcgccggcggggtgatagcaggggcagcctgctctcgccccggcccatttcctatctgaaaggctcctcggggggcccgctgttgtgccccgcgggacacgccgtaggcatattcagggcgcggtgtgcacccgtggagtggctaaggcggtggactttatccctgtggagaacctagagacaaccatgaggtccccggtgttcacggacaactcctctccgccagcagtgccccagagcttccaggtggcccacctgcatctcccacaggcagcggcaagagcaccaaggtcccggctgcgtatgcggctcagggctataaggtgctagtactcaacccctctgtcgctgcaacactgggctttggtgcttatatgtccaaggcccagggatcgatcctaatatcaggaccggggcgagaacaattaccactggcagccccatcacgtactccacctacggcaaatttcttgccgacggcgggtgctcggggggcgcttatgatataataatttgtgacgagtgccatccacggatgccacatccatcttgggcatcggcactgtccttgaccaggcagagaccgcgggggcgagactggttgtgctcgccaccgccacccctccgggctccgtcactgtgccccatcctaacatgaggaggttgctctgtccaccaccggagagattcctttctatggcaaggctatccccctcgaagtaatcaaaggggggagacatctcattttttgtcactcaaagaagaagtgcgacgagctcgccgcaaagctagtcgcatgggcatcaatgccgtggcctactaccgcggtcttgacgtgtccgtcatcccgaccagcggcgatgttgtcgtcgtggcaactgatgctctcatgaccggctttaccggcgacttcgactcggtgatgactgcaacacgtgtgtcacccagacggtcgacttcagccttgaccctactttcaccattgagacaaccacgcttccccaggatgctgtctcccgcactcaacgtcggggtaggactggcagggggaagccaggcatctacgatttgtggcaccgggggagcgcccctccggcatgttcgactcgtccatcctctgtgagtgctatgacgcgggctgtgcttggtatgagctcacgcccgccgagactacagttagactacgagcgtaatgaacaccccggggcttcccgtgtgccaagaccatcttgaattttgggagggcgtcttcacaggcctcactcatatagatgcccacttcctatcccaaacaaagcagagtggggagaatcttccttacctggtagcgtacaagccaccgtgtgcgctagggctcaagcccctcccccatcgtgggaccagatgtggaagtgtttgatccgcctcaaacccaccctccatgggccaacacctctgctatacagactgggcgctgtccaaatgaggtcaccctgacgcacccagtcaccaaatacattatga

SEQ ID NO: 25 - DNA, 4853 bp, Hepatitis C virus
tcgcccacaggacgttaagttcccgggtggcggtcagatcgttggtggagtttacttgttgccgcgcaggggccctagaatgggtgtgcgcgcgccgaggaagacttccgagcggtcgcaacctcgagtagacgtcagcctatccccaaggcacgtcggcccgagggcaggacctgggctcagcccgggtacccttggcccctctatggcaatgagggctgcgggtgggcgggatggctcctgtccccccgcggtctcggcctagttggggccccacagacccccggcgtaggtcgcgcaatttgggtaaggtcatcgacacccttacgtgcggcttcgccgacctcatggggtacataccgctcgtcggcgcccctcttggaggcgctgccaggccctggcgcatggcgttcgggttctggaagacggcgtgaactatgcaacagggaaccttcctggttgctctttctctatcttctttctggccctgctctcttgtctgactgtgcccgcttcggcctacaagtgcgcaactctacagggctctaccacgtcaccaatgattgccctaactcgagtattgtgtacgaggcgcctgatgccatcctgcacactccggggtgtgtcccttgcgttcgcgagggtaacgcctcgaggtgttggtggcgatgacccccacggtggccaccagggacggcaaactccccgcgacgcagcttcgacgtcacatcgatctgcttgtcgggagcgccaccctctgttcggctctttacgtgggggacctgtgcggtctgtctttcttgtgggtcaactgtttaccttctcccccaggcgccactggacgacgcaagactgcaattgctctatctatcccggccatataacgggtcaccgcatggcatgggatatgatgatgaactggtccccgacgcggcgttggtaatggctcagctgctccggatcccgcaagccatcttggacatgatcgctggtgcccactggggagtcttggcgggcatagcgtatttctccatggtggggaactgggcgaaggtcctgtagtgctgctgctattcgccggcgtcgacgcggaaaccatgaccaccgggggggccgccgctcgcaacgtgtatagaatttccagcttcttctcgccgggcccccagcagaacatccagctgatcaacaccaacggcagtggcacatcaataggacggccttgaactgcaacgacagccttaacaccggctggttagcagggcttttctatcatcgcagcttcaactcttcaggctgtcctgcgaggctggccagctgccgacgcctaccgactttgcccagggctggggccctatcagccatgccaacggcagcggccccgaccaacgcccctactgttggcactaccccccaaaaccttgcggtattgtgcccgcacggaacgtgtgtggcccggtatattgcttccccccagtcccgtggcggtgggaacgaccgacagggcgggcgtccctacctaccgctggggtgaaaatgaaacggacgtcttcgtccttaacaacaccaggccaccgctgggcaattggttcggttgacctggatgaattcaactggattcaccaaagtgtgcggagcgcctccttgtgtcatcggaggagtgggcaacgacaccttgtactgccccactgattgtttccgcaagcatccggaagccacatattcccggtgcggctccgtccctggattacacccagatgcctggttgactacccgtataggctttggcattatccttgtaccgtcaactacaccatattcaaagtcaggatgtatgtgggaggggtcgagcataggctggatgcgcctgcaactggacgcggggcgaacgttgcgatctggaagacagggacaggtccgagctcagcccgttgctgctgtccactacacagtggcaggtccttccgtgctccttcacgaccttgccagccttgtccaccggcctctccacctccaccagaacattgtggacgtgcagtacctgtacggggtagggtcaagcatcgcgtcctgggccattaagtgggagtacgtcgttctcctgttccttctgcttgcagacgcgcgcgtctgtcctgcctgtggatgatgctactcatatcccaagcggaggcggctttggagaacctcgtaatactcaatgcagcatccctggccgggacgcaaggtcttgtatccttcctcgtgttcttctgctttgcgtggtatctgaaggtaggtgggtgccaggagcggtttacgccctctacggaatgtggcctctcctcctgctcctgttggcgttgccccagcgggcatacgcgctggacacggaggtggccgcgtcgtgtggcggcgttgtcttgtcgggttgatgatgctgactctgtcaccgtattacaagcgctatatcagctggtgcttatggtggcttcagtattttctgactagggcagaagcgcaactgcacgtgtgggttccccccctcaacgttcgagggggggcgacgctgccatcttactcacatgcgttgtacacccgactctggtatttgacatcaccaaactactgctggctgtcctcggacccctttggattcttcaagccagtttgcttaaagtaccctacttgtgcgcgtccaaggccttctccggatctgcgcgttagcgcggaagacggtcggaggccactacgtgcaaatggttatcatcaagttagggatgcttactggcacctatgtttataaccatctcacccccctccgggactggcgcacaacggcctgcgagatctggccgtggctgtagaaccagtcgtcttctcccaaatggagaccaagctcatcacgtggggggcagacactgccgcgtgcggtgacatcatcaacggcttgcccgttccgcccgtaggggccaggagatactgctcggaccagccgatggaatggtctccaaggggtggaggttgctggcgcccatcacggcgtacgcccagcagacaaggggcctcctagggtgcataatcaccagcctaaccggcgggataaaaaccaagtggagggtgaggtccagattgtgtcaactgctgcccaaactttcctggcaacgtgcatcagtggggtatgctggactgtctaccacggggccggaacgaggactattgcatctccaaaggccctgttatccagatgtataccaatgtggacaaagaccttgtgggctggcccgctcctcaaggtgcccgctcattgacaccctgcacctgcggctcctcggacctttacctggtcacgaggcatgccgatgtctccccgtgcgccggcggggtgatagcaggggcagcctgctctcgccccggcccatttcctatctgaaaggctcctcggggggcccgctgttgtgccccgcgggacacgccgtaggcatattcagggcgcggtgtgcacccgtggagtggctaaggcggtggactttatccctgtggagaacctagagacaaccatgaggtccccggtgttcacggacaactcctctccgccagcagtgccccagagcttccaggtggcccacctgcatctcccacaggcagcggcaagagcaccaaggtcccggctgcgtatgcggctcagggctataaggtgctagtactcaacccctctgtcgctgcaacactgggctttggtgcttatatgtccaaggcccagggatcgatcctaatatcaggaccggggcgagaacaattaccactggcagccccatcacgtactccacctacggcaaatttcttgccgacggcgggtgctcggggggcgcttatgatataataatttgtgacgagtgccatccacggatgccacatccatcttgggcatcggcactgtccttgaccaggcagagaccgcgggggcgagactggttgtgctcgccaccgccacccctccgggctccgtcactgtgccccatcctaacatgaggaggttgctctgtccaccaccggagagattcctttctatggcaaggctatccccctcgaagtaatcaaaggggggagacatctcattttttgtcactcaaagaagaagtgcgacgagctcgccgcaaagctagtcgcatgggcatcaatgccgtggcctactaccgcggtcttgacgtgtccgtcatcccgaccagcggcgatgttgtcgtcgtggcaactgatgctctcatgaccggctttaccggcgacttcgactcggtgatgactgcaacacgtgtgtcacccagacggtcgacttcagccttgaccctactttcaccattgagacaaccacgcttccccaggatgctgtctcccgcactcaacgtcggggtaggactggcagggggaagccaggcatctacgatttgtggcaccgggggagcgcccctccggcatgttcgactcgtccatcctctgtgagtgctatgacgcgggctgtgcttggtatgagctcacgcccgccgagactacagttagactacgagcgtaatgaacaccccggggcttcccgtgtgccaagaccatcttgaattttgggagggcgtcttcacaggcctcactcatatagatgcccacttcctatcccaaacaaagcagagtggggagaatcttccttacctggtagcgtacaagccaccgtgtgcgctagggctcaagcccctcccccatcgtgggaccagatgtggaagtgtttgatccgcctcaaacccaccctccatgggccaacacctctgctatacagactgggcgctgtccaaatgaggtcaccctgacgcacccagtcaccaaatacattatga

SEQ ID NO: 26 - DNA, 4853 bp, Hepatitis C virus; identical to SEQ ID NO: 23

SEQ ID NO: 27 - DNA, 4853 bp, Hepatitis C virus; identical to SEQ ID NO: 23

SEQ ID NO: 28 - DNA, 4853 bp, Hepatitis C virus; identical to SEQ ID NO: 23

SEQ ID NO: 29 - DNA, 4853 bp, Hepatitis C virus
tcgcccacaggacgttaagttcccgggtggcggtcagatcgttggtggagtttacttgttgccgcgcaggggccctagaatgggtgtgcgcgcgccgaggaagacttccgagcggtcgcaacctcgagtagacgtcagcctatccccaaggcacgtcggcccgagggcaggacctgggctcagcccgggtacccttggcccctctatggcaatgagggctgcgggtgggcgggatggctcctgtccccccgcggtctcggcctagttggggccccacagacccccggcgtaggtcgcgcaatttgggtaaggtcatcgacacccttacgtgcggcttcgccgacctcatggggtacataccgctcgtcggcgcccctcttggaggcgctgccaggccctggcgcatggcgttcgggttctggaagacggcgtgaactatgcaacagggaaccttcctggttgctctttctctatcttctttctggccctgctctcttgtctgactgtgcccgcttcggcctacaagtgcgcaactctacagggctctaccacgtcaccaatgattgccctaactcgagtattgtgtacgaggcgcctgatgccatcctgcacactccggggtgtgtcccttgcgttcgcgagggtaacgcctcgaggtgttggtggcgatgacccccacggtggccaccagggacggcaaactccccgcgacgcagcttcgacgtcacatcgatctgcttgtcgggagcgccaccctctgttcggctctttacgtgggggacctgtgcggtctgtctttcttgtgggtcaactgtttaccttctcccccaggcgccactggacgacgcaagactgcaattgctctatctatcccggccatataacgggtcaccgcatggcatgggatatgatgatgaactggtccccgacgcggcgttggtaatggctcagctgctccggatcccgcaagccatcttggacatgatcgctggtgcccactggggagtcttggcgggcatagcgtatttctccatggtggggaactgggcgaaggtcctgtagtgctgctgctattcgccggcgtcgacgcggaaaccatgaccaccgggggggccgccgctcgcaacgtgtatagaatttccagcttcttctcgccgggcccccagcagaacatccagctgatcaacaccaacggcagtggcacatcaataggacggccttgaactgcaacgacagccttaacaccggctggttagcagggcttttctatcatcgcagcttcaactcttcaggctgtcctgcgaggctggccagctgccgacgcctaccgactttgcccagggctggggccctatcagccatgccaacggcagcggccccgaccaacgcccctactgttggcactaccccccaaaaccttgcggtattgtgcccgcacggaacgtgtgtggcccggtatattgcttccccccagtcccgtggcggtgggaacgaccgacagggcgggcgtccctacctaccgctggggtgaaaatgaaacggacgtcttcgtccttaacaacaccaggccaccgctgggcaattggttcggttgacctggatgaattcaactggattcaccaaagtgtgcggagcgcctccttgtgtcatcggaggagtgggcaacgacaccttgtactgccccactgattgtttccgcaagcatccggaagccacatattcccggtgcggctccgtccctggattacacccagatgcctggttgactacccgtataggctttggcattatccttgtaccgtcaactacaccatattcagagtcaggatgtatgtgggaggggtcgagcataggctggatgcgcctgcaactggacgcggggcgaacgttgcgatctggaagacagggacaggtccgagctcagcccgttgctgctgtccactacacagtggcaggtccttccgtgctccttcacgaccttgccagccttgtccaccggcctctccacctccaccagaacattgtggacgtgcagtacctgtacggggtagggtcaagcatcgcgtcctgggccattaagtgggagtacgtcgttctcctgttccttctgcttgcagacgcgcgcgtctgtcctgcctgtggatgatgctactcatatcccaagcggaggcggctttggagaacctcgtaatactcaatgcagcatccctggccgggacgcaaggtcttgtatccttcctcgtgttcttctgctttgcgtggtatctgaaggtaggtgggtgccaggagcggtttacgccctctacggaatgtggcctctcctcctgctcctgttggcgttgccccagcgggcatacgcgctggacacggaggtggccgcgtcgtgtggcggcgttgtcttgtcgggttgatgatgctgactctgtcaccgtattacaagcgctatatcagctggtgcttatggtggcttcagtattttctgactagggcagaagcgcaactgcacgtgtgggttccccccctcaacgttcgagggggggcgacgctgccatcttactcacatgcgttgtacacccgactctggtatttgacatcaccaaactactgctggctgtcctcggacccctttggattcttcaagccagtttgcttaaagtaccctacttgtgcgcgtccaaggccttctccggatctgcgcgttagcgcggaagatggtcggaggccactacgtgcaaatggttatcatcaagttagggatgcttactggcacctatgtttataaccatctcacccccctccgggactggcgcacaacggcctgcgagatctggccgtggctgtagaaccagtcgtcttctcccaaatggagaccaagctcatcacgtggggggcagacactgccgcgtgcggtgacatcatcaacggcttgcccgttccgcccgtaggggccaggagatactgctcggaccagccgatggaatggtctccaaggggtggaggttgctggcgcccatcacggcgtacgcccagcagacaaggggcctcctagggtgcataatcaccagcctaaccggcgggataaaaaccaagtggagggtgaggtccagattgtgtcaactgctgcccaaactttcctggcaacgtgcatcagtggggtatgctggactgtctaccacggggccggaacgaggactattgcatctccaaaggccctgttatccagatgtataccaatgtggacaaagaccttgtgggctggcccgctcctcaaggtgcccgctcattgacaccctgcacctgcggctcctcggacctttacctggtcacgaggcatgccgatgtctccccgtgcgccggcggggtgatagcaggggcagcctgctctcgccccggcccatttcctatctgaaaggctcctcggggggcccgctgttgtgccccgcgggacacgccgtaggcatattcagggcgcggtgtgcacccgtggagtggctaaggcggtggactttatccctgtggagaacctagagacaaccatgaggtccccggtgttcacggacaactcctctccgccagcagtgccccagagcttccaggtggcccacctgcatctcccacaggcagcggcaagagcaccaaggtcccggctgcgtatgcggctcagggctataaggtgctagtactcaacccctctgtcgctgcaacactgggctttggtgcttatatgtccaaggcccagggatcgatcctaatatcaggaccggggcgagaacaattaccactggcagccccatcacgtactccacctacggcaaatttcttgccgacggcgggtgctcggggggcgcttatgatataataatttgtgacgagtgccatccacggatgccacatccatcttgggcatcggcactgtccttgaccaggcagagaccgcgggggcgagactggttgtgctcgccaccgccacccctccgggctccgtcactgtgccccatcctaacatgaggaggttgctctgtccaccaccggagagattcctttctatggcaaggctatccccctcgaagtaatcaaaggggggagacatctcattttttgtcactcaaagaagaagtgcgacgagctcgccgcaaagctagtcgcatgggcatcaatgccgtggcctactaccgcggtcttgacgtgtccgtcatcccgaccagcggcgatgttgtcgtcgtggcaactgatgctctcatgaccggctttaccggcgacttcgactcggtgatgactgcaacacgtgtgtcacccagacggtcgacttcagccttgaccctactttcaccattgagacaaccacgcttccccaggatgctgtctcccgcactcaacgtcggggtaggactggcagggggaagccaggcatctacgatttgtggcaccgggggagcgcccctccggcatgttcgactcgtccatcctctgtgagtgctatgacgcgggctgtgcttggtatgagctcacgcccgccgagactacagttagactacgagcgtaatgaacaccccggggcttcccgtgtgccaagaccatcttgaattttgggagggcgtcttcacaggcctcactcatatagatgcccacttcctatcccaaacaaagcagagtggggagaatcttccttacctggtagcgtacaagccaccgtgtgcgctagggctcaagcccctcccccatcgtgggaccagatgtggaagtgtttgatccgcctcaaacccaccctccatgggccaacacctctgctatacagactgggcgctgtccaaatgaggtcaccctgacgcacccagtcaccaaatacattatga

SEQ ID NO: 30 - DNA, 4853 bp, Hepatitis C virus
tcgcccacaggacgttaagttcccgggtggcggtcagatcgttggtggagtttacttgttgccgcgcaggggccctagaatgggtgtgcgcgcgccgaggaagacttccgagcggtcgcaacctcgagtagacgtcagcctatccccaaggcacgtcggcccgagggcaggacctgggctcagcccgggtacccttggcccctctatggcaatgagggctgcgggtgggcgggatggctcctgtctccccgcggtctcggcctagttggggccccacagacccccggcgtaggtcgcgcaatttgggtaaggtcatcgatacccttacgtgcggcttcgccgacctcatggggtacataccgctcgtcggcgcccctcttggaggcgctgccaggccctggcgcatggcgtccgggtcctggaagacggcgtgaactatgcaacagggaaccttcctggttgctctttctctatcttccttctggccctgctctcttgtctgactgtgcccgcttcggcctacaagtgcgcaactccacggggctctatcacgtcaccaatgattgccctaactcgagtattgtgtacgaggcgcctgatgccatcctgcacactccggggtgtgtcccttgcgttcgcgagggtaatgcctcgaggtgttggtggcgatgacccccacggtggccaccagggacggcaaactccctgcgacgcagctccgacgtcacatcgatctgcttgtcgggagcgccaccctctgttcggccctctacgtgggggacctgtgcggtctgtctttcttgttggtcaactgtttaccttctctcccaggcgccactggacgacgcaagactgcaattgttctatctatcccggccatataacgggccaccgcatggcatgggatatgatgatgaactggtccccgacgcagcgttggtaatggctcagctgctccggatcccgcaagccatcttggacatgatcgctggtgctcactggggagtcctggcgggcatagcgtatttctccatggtggggaactgggcgaaggtcctgtagtgctgttgctattcgccggcgtcgatgcggaaaccgtcgtcaccggggggaccgccgcccgcaacgcgtacggactctctagtctcttcatgcggggccccaagcagaacatccagctgatcaacaccaacggcagtggcacatcaataggacggccttgaactgcaacgatagccttaacaccggctggctagcagggcttttctatcagcacaacttcaactcttcaggctgtcctgagaggctggccagctgccgacgcctgccgattttgcccagggctggggccctatcagccatgccaacggcagcggccccgaccaccgcccctactgctggcactaccccccaaaaccttgcggtattgtgcccgcacagaacgtgtgtggtccggtatattgcttcctcccagccccgtggcggtgggaacgaccgacaggtcgggcgtccctacctaccgctggggtgaaaatgagacggacgtcttcgtccttaacaacaccaggccaccgctgggcaattggtttggttgacctggatgaactcaactggattcaccaaagtgtgcggagcgcctccttgtgtcatcggaggggcgggcaacaacaccttgcactgccccaccgattgtttccgcaagcatccggaagccacatactcccggtgcggctccgtccctggattacacccagatgcatggtcgactacccgtataggctttggcattatccttgtaccatcaactataccatatttaaagtcaggatgtacgtgggaggggtcgagcataggctggatgtgcctgcaactggacgcggggcgaacgctgcgatctggaagacagggacaggtccgagctcagcccgttgctgctgtccaccacacagtggcaggtccttccgtgttccttcacgaccttgccggccttgtccaccggcctctccacctccaccagaacatcgtggacgtacagtacctgtacggggtggggtcaagcattgcgtcctgggccattaagtgggagtacgtcgttctcctgttccttctgcttgcagacgcgcgcgtctgtcctgcctgtggatgatgctactcatatcccaagcggaggcggctttggagaacctcgtaacactcaatgcagcatccctggccgggacgcaaggtcttgtatccttcctcgtgttcttctgtttcgcgtggtatctgaaggtaggtgggtgccaggagcggtttacgccctctacgggatgtggcctctcctcctgctcctgttggcgttgccccagcgggcatacgcgctggacacggaggtggccgcgtcgtgtggcggcgttgtctcgtcgggttgatggcgctgactctgtcaccgtattacaagcgctacatcagctggtgcttatggtggctccagtattttctgactagagcagaagcgcaactgcacgtatgggttccccccctcaacgctcgagggggggcgacgctgtcatcttactcatgtgtgttgtacacccgactttggtatttgacatcaccaaactactgctggccgtcctcggacccctttggattcttcaagccagtctgcttaaagtaccctacttgtgcgcgtccagggccttctccggatctgcgcgttagcgcggaagatggttgggggccactacgtgcaaatggttatcatcaagctagggacgcttactggcacctatgtttacaaccatctcactcctcttcgggactggcgcacaacggcctgcgagatctggccgtggctgtagagccagtcgtcttctcccaaatggagaccaagctcatcacatggggggcagacactgccgcgtgcggtgacatcatcaacggcttgcccgttccgcccgtaggggccgggagatactgctcggaccagccgatggaatggtctccaaggggtggaggttgctggcgcccatcacggcgtacgcccagcagacaaggggcctcttaggatgcataatcaccagcctgaccggcgggacaaaaaccaagtggagggtgaagtccagattgtgtcaactgctgcccaaactttcctcgcaacgtgcatcagtggggtatgctggactgtctaccacggggccggaacgaggactattgcatctccaaaggccctgttatccagatgtataccaatgtggacaaagaccttgtgggctggcccgcccctcaaggtgcccgctcattgacgccctgcacctgcggctcctcggacctttacctggtcacgaggcatgccgatgtctccccgtgcgccggcggggtgatagcaggggcagcctgctttcgccccggcccatttcctatttgaaaggttcctcggggggcccgctgttgtgccccgcgggacacgccgtaggcatattcagggcgcggtgtgcacccgtggagtggctaaggcggtggactttatccccgtggagaacctagagacaaccatgaggtccccggtgtttacggacaactcctctccgccagcagtgccccagagcttccaggtggcccacctgcatctcccacgggcagcggcaagagcaccaaggtcccagctgcatatgcggctcagggctataaagtgctagtgctcaacccctctgttgctgcaacactgggctttggtgtttatatgtccaaggcccagggattgatcctaacatcaggaccggggcgagaacaattaccactggcagccccatcacgtactccacctacggcaagttccttgccgacggcgggtgctcggggggcgcctatgatataataatttgtgacgagtgccacccacggatgccacatccatcttgggcatcggcactgtccttgaccaggcagagaccgcgggggcgagactagttgtgctcgccaccgccacccctccgggctccatcactgtgccccatcctaacatgaggaggttgctctgtccaccaccggagagattcctttctatggcaaggctatccccctcgaagtaatcaaaggggggagacatctcattttttgtcactcaaagaagaagtgcgatgagctcgccgcaaagctggtcgcatgggcatcaatgccgtggcctactaccgcggtcttgacgtgtccgtcatcccgaccagcggcgatgttgtcgtcgtggcaactgatgctctcatgaccggttttaccggcgacttcgactcggtgatgactgcaacacgtgtgtcacccagacggtcgatttcagccttgaccctaccttcaccattgagacaaccacgcttccccaagatgctgtctcccgcactcagcgtcggggcaggactggcagggggaagccaggcatctacggtttgtggcaccaggggagcgcccttccggcatgttcgactcgtccatcctctgtgagtgctatgacgcgggttgtgcttggtatgagctcacacccgccgagactacagttagactacgagcgtaatgaacaccccggggcttcccgtgtgccaagaccatctcgaattttgggagggggtcttcacaggcctcactcatatagatgcccacttcctatcccagacaaagcagagtggggagaatcttccttacctggtagcgtacaagccaccgtgtgcgctagggctcaagcccctcccccatcgtgggaccagatgtggaagtgtttgatccgcctcaaacccacccttcatgggccaacacctctgctatacagactgggtgctgtccaaatgaggtcaccctgacgcacccagtcaccaaatatatcatga

SEQ ID NO: 31 - DNA, 4853 bp, Hepatitis C virus; identical to SEQ ID NO: 23

SEQ ID NO: 32 - DNA, 4853 bp, Hepatitis C virus
tcgcccacaggacgttaagttcccgggtggcggtcagatcgttggtggagtttacttgttgccgcgcaggggccctagaatgggtgtgcgcgcgccgaggaagacttccgagcggtcgcaacctcgagtagacgtcagcctatccccaaggcacgtcggcccgagggtaggacctgggctcagcccgggtacccttggcccctctatggcaatgagggctgcgggtgggcgggatggctcctgtctccccgcggtctcggcctagttggggccccacagacccccggcgtaggtcgcgcaatttgggtaaggtcatcgatacccttacgtgcggcttcgccgacctcatggggtacataccgctcgtcggcgcccctcttggaggcgctgccaggccctggcgcatggcgtccgggttctggaagacggcgtgaactatgcaacggggaaccttcccggttgctctttctctatcttccttctggccctgctctcttgtctgactgtgcccgcttcggcctacaagtgcgcaactccacggggctttaccacgtcaccaatgattgccccaactcgagtattgtgtacgaggcgcctgatgccatcctgcacactccggggtgtgtcccttgcgttcgcgagggtaacgcctcgaggtgttggtggcgatgacccccacggtggccaccagggacggcaaactccctgcaacgcagctccgacgtcacatcgatctgcttgtcgggagtgccaccctctgttcggccctctacgtgggggacctgtgcggtctgtctttcttgttggtcaactgtttaccttctctcccaggcgccactggacgacgcaagactgcaattgttctatctatcccggccatataacgggccaccgcatggcatgggatatgatgatgaactggtccccgacgcggcgttggtaatggctcagctgctccggatcccgcaagccatcttggatatgatcgctggtgcccactggggagtcctggcgggcatagcgtatttctccatggtggggaactgggcgaaggtcctgtagtgctgctgctatttgccggcgtcgatgcgggaaccgtcgtcaccggaggggtcgccgcccgcaccgcgtatggatttactagtctcttcacgcgaggcgcccagcagaacatccagctgatcaacaccaacggcagtggcacatcaataggacggccttgaactgcaacgacagccttaacaccggctggttagcagggcttttctatcggaacaacttcaactcttcaggctgtcctcagaggttggccagctgccggcgcctgccgattttgcccagggctggggccctatcagccatgccaacggcagcggccccgaccaccgcccctactgctggcactaccccccaaaaccttgcggcattgtgcccgcacagaacgtgtgtggcccggtatattgcttcctcccagccccgtggcggtgggaacgaccgacagggcgggcatccctacctacagctggggtgaaaatgatacggacgtcttcgtccttaacaacaccaggccaccgctgggcaattggtttggttgacctggatgaactcaactggattcaccaaagtgtgtggagcgcccccttgtgtcatcggaggggtgggcaacaacaccttgcactgccccactgattgtttccgcaagcatccggaagccacatactcccggtgcggctccgtccctggattacacccagatgcctggtcgactacccgtataggctttggcattatccttgtaccatcaactataccatattcaaagtcaggatgtatgtgggaggggtcgagcataggctggatgcgcctgcaactggacgcggggcgaacgttgcgatctggaagacagggacaggtccgagctcagcccgttgctgctgtccactacacagtggcaggtccttccgtgttccttcacgaccttgccagccttgtccaccggtctctccacctccaccagaacatcgtggacgtgcagtacctgtacggggtggggtcaagcatcgcgtcctgggccatcaagtgggagtacgtcgttctcctgttccttctgcttgcagacgcgcgcgtctgtcctgcctgtggatgatgctactcatatcccaagcggaggcggctttggagaacctcgtaatactcaatgcagcatccctggccgggacgcaaggtcttgtatccttcctcgtgttcttctgctttgcatggtatctgaaggtaggtgggtgccaggagcggtttacgccctctacggaatgtggcctctcctcctgctcctgctggcgttgccccagcgggcatacgcgctggacacggaggtggccgcgtcgtgtggcggcgttgtctcgtcgggttgatggcgctgactctgtcaccgtattacaagcgctacatcagctggtgcttatggtggctccagtattttctgactagagcagaagcgcaactgcacgtgtgggttccccccctcaacgttcgagggggggcgacgccgtcatcttactcatgtgtgttgtacacccgactttggtatttgacatcaccaaactactgctggccgtcctcggacccctttggattcttcaagccagtttgcttaaagtaccctacttgtgcgcgtccaaggccttctccggatctgcgcgttagcgcggaagatggtcgggggccaatacgtgcaaatggttatcatcaagttagggacgcttactggcacctatgtttacaaccatctcactcctcttcgggactggcgcacaacggcctgcgagatctggccgtggctgtagagccagtcgtcttctcccaaatggagaccaagctcatcacgtggggggcagacactgccgcgtgcggtgacatcatcaacggtctgcccgttccgcccgtaggggtcgggagatactgctcggaccagccgatggaatggtctccaaggggtggaggttgctggcgcccatcacggcgtacgcccagcagacaaggggcctcctagggtgcataatcaccagcctaaccggcgggacaaaaaccaagtggagggtgaggtccagattgtgtcaactgctgcccaaactttcctggcaacgtgcatcagtggggtatgctggactgtctaccacggggccggaacgaggactattgcatctccaaaggccccgttatccagatgtataccaatgtggacaaagaccttgtgggctggcccgctcctcaaggtgcccgctcattgacaccctgcacctgcggctcctcggacctttacctggtcacgaggcatgccgatgtctccccgtgcgccggcggggtgatagcaggggcagcctgctctcgccccggcccatttcctacttgaaaggctcctcggggggcccgctgttgtgccccgcgggacacgccgtaggcatattcagggcgcggtgtgcacccgtggagtggctaaggcggtggactttatccctgtggagaacctagagacaaccatgaggtccccggtgttcacggacaactcctctccgccagcagtgccccagagcttccaggtggcccacctgcatctcccacaggcagcggcaagagcaccaaggtcccggctgcatacgcggctcagggctataaggtgctagtgctcaacccttctgttgctgcaacattgggctttggtgcttacatgtccaaggcccagggatcgatcctaatatcaggaccggggcgagaacaattactactggcagccccatcacgtactccacctacggtaagttccttgccgacggcgggtgctcggggggcgcttatgatataataatttgtgacgagtgccacccacggatgccacatccatcttgggcatcggcactgtccttgaccaggcagagaccgcgggggcgagactggttgtgctcgccaccgccacccctccgggctccgtcactgtgccccaccccaacatgaggaggttgctctgtccaccaccggagagattcctttctatggcaaggctatccccctcgaagtaatcaaaggggggagacatctcattttttgtcactcaaagaagaagtgcgacgagctcgccgcaaagctggtcgcatgggcatcaatgccgtggcctactaccgcggtcttgatgtgtctgtcatcccgaccagcggcgatgttgtcgtcgtggcaactgatgctctcatgaccggctttaccggcgacttcgactcggtgatgactgcaacacgtgtgtcacccagacggtcgatttcagccttgaccctaccttcaccattgagacaaccacgcttccccaagacgctgtctcccgcactcaacgtcggggcaggactggcagggggaagccaggcatctacgatttgtggcaccgggggagcgcccttccggcatgttcgactcgtccgtcctctgtgagtgctatgacgcgggctgtgcttggtatgagctcacgcccgccgagactacagttagactacgagcgtaatgaacaccccggggcttcccgtgtgccaagaccatctcgaattttgggagggcgtcttcacaggcctcactcatatagatgcccacttcctatcccagacaaagcagagtggggagaatcttccttacctggtagcgtacaagccaccgtgtgcgctagggcccaagcccctcccccatcgtgggaccagatgtggaagtgtttgatccgcctcaaacccaccctccatgggccaacacctctgctatacagactgggcgctgtccaaatgaggtcaccttgacgcacccagtcactaaatacatcatga

SEQ ID NO: 33 - DNA, 4853 bp, Hepatitis C virus
tcgcccacaggacgttaagttcccgggtggcggtcagatcgttggtggagtttacttgttgccgcgcaggggccctagaatgggtgtgcgcgcgccgaggaagacttccgagcggtcgcaacctcgagtagacgtcagcctatccccaaggcacgtcggcccgagggcaggacctgggctcagcccgggtacccttggcccctctatggcaatgagggctgcgggtgggcgggatggctcctgtccccccgcggtctcggcctagttggggccccacagacccccggcgtaggtcgcgcaatttgggtaaggtcatcgacacccttacgtgcggcttcgccgacctcatggggtacataccgctcgtcggcgcccctcttggaggcgctgccaggccctggcgcatggcgttcgggttctggaagacggcgtgaactatgcaacagggaaccttcctggttgctctttctctatcttctttctggccctgctctcttgtctgactgtgcccgcttcggcctacaagtgcgcaactctacagggctctaccacgtcaccaatgattgccctaactcgagtattgtgtacgaggcgcctgatgccatcctgcacactccggggtgtgtcccttgcgttcgcgagggtaacgcctcgaggtgttggtggcgatgacccccacggtggccaccagggacggcaaactccccgcgacgcagcttcgacgtcacatcgatctgcttgtcgggagcgccaccctctgttcggctctttacgtgggggacctgtgcggtctgtctttcttgtgggtcaactgtttaccttctcccccaggcgccactggacgacgcaagactgcaattgctctatctatcccggccatataacgggtcaccgcatggcatgggatatgatgatgaactggtccccgacgcggcgttggtaatggctcagctgctccggatcccgcaagccatcttggacatgatcgctggtgcccactggggagtcttggcgggcatagcgtatttctccatggtggggaactgggcgaaggtcctgtagtgctgctgctattcgccggcgtcgacgcggaaaccatgaccaccgggggggccgccgctcgcaacgtgtatagaatttccagcttcttctcgccgggcccccagcagaacatccagctgatcaacaccaacggcagtggcacatcaataggacggccttgaactgcaacgacagccttaacaccggctggttagcagggcttttctatcatcgcagcttcaactcttcaggctgtcctgcgaggctggccagctgccgacgcctaccgactttgcccagggctggggccctatcagccatgccaacggcagcggccccgaccaacgcccctactgttggcactaccccccaaaaccttgcggtattgtgcccgcacggaacgtgtgtggcccggtatattgcttccccccagtcccgtggcggtgggaacgaccgacagggcgggcgtccctacctaccgctggggtgaaaatgaaacggacgtcttcgtccttaacaacaccaggccaccgctgggcaattggttcggttgacctggatgaattcaactggattcaccaaagtgtgcggagcgcctccttgtgtcatcggaggagtgggcaacgacaccttgtactgccccactgattgtttccgcaagcatccggaagccacatattcccggtgcggctccgtccctggattacacccagatgcctggttgactacccgtataggctttggcattatccttgtaccgtcaactacaccatattcaaagtcaggatgtatgtgggaggggtcgagcataggctggatgcgcctgcaactggacgcggggcgaacgttgcgatctggaagacagggacaggtccgagctcagcccgttgctgctgtccactacacagtggcaggtccttccgtgctccttcacgaccttgccagccttgtccaccggcctctccacctccaccagaacattgtggacgtgcagtacctgtacggggtagggtcaagcatcgcgtcctgggccattaagtgggagtacgtcgttctcctgttccttctgcttgcagacgcgcgcgtctgtcctgcctgtggatgatgctactcatatcccaagcggaggcggctttggagaacctcgtaatactcaatgcagcatccctggccgggacgcaaggtcttgtatccttcctcgtgttcttctgctctgcgtggtatctgaaggtaggtgggtgccaggagcggtttacgccctctacggaatgtggcctctcctcctgctcctgttggcgttgccccagcgggcatacgcgctggacacggaggtggccgcgtcgtgtggcggcgttgtcttgtcgggttgatgatgctgactctgtcaccgtattacaagcgctatatcagctggtgcttatggtggcttcagtattttctgactagggcagaagcgcaactgcacgtgtgggttccccccctcaacgttcgagggggggcgacgctgccatcttactcacatgcgttgtacacccgactctggtatttgacatcaccaaactactgctggctgtcctcggacccctttggattcttcaagccagtttgcttaaagtaccctacttgtgcgcgtccaaggccttctccggatctgcgcgttagcgcggaagatggtcggaggccactacgtgcaaatggttatcatcaagttagggatgcttactggcacctatgtttataaccatctcacccccctccgggactggcgcacaacggcctgcgagatctggccgtggctgtagaaccagtcgtcttctcccaaatggagaccaagctcatcacgtggggggcagacactgccgcgtgcggtgacatcatcaacggcttgcccgttccgcccgtaggggccaggagatactgctcggaccagccgatggaatggtctccaaggggtggaggttgctggcgcccatcacggcgtacgcccagcagacaaggggcctcctagggtgcataatcaccagcctaaccggcgggataaaaaccaagtggagggtgaggtccagattgtgtcaactgctgcccaaactttcctggcaacgtgcatcagtggggtatgctggactgtctaccacggggccggaacgaggactattgcatctccaaaggccctgttatccagatgtataccaatgtggacaaagaccttgtgggctggcccgctcctcaaggtgcccgctcattgacaccctgcacctgcggctcctcggacctttacctggtcacgaggcatgccgatgtctccccgtgcgccggcggggtgatagcaggggcagcctgctctcgccccggcccatttcctatctgaaaggctcctcggggggcccgctgttgtgccccgcgggacacgccgtaggcatattcagggcgcggtgtgcacccgtggagtggctaaggcggtggactttatccctgtggagaacctagagacaaccatgaggtccccggtgttcacggacaactcctctccgccagcagtgccccagagcttccaggtggcccacctgcatctcccacaggcagcggcaagagcaccaaggtcccggctgcgtatgcggctcagggctataaggtgctagtactcaacccctctgtcgctgcaacactgggctttggtgcttatatgtccaaggcccagggatcgatcctaatatcaggaccggggcgagaacaattaccactggcagccccatcacgtactccacctacggcaaatttcttgccgacggcgggtgctcggggggcgcttatgatataataatttgtgacgagtgccatccacggatgccacatccatcttgggcatcggcactgtccttgaccaggcagagaccgcgggggcgagactggttgtgctcgccaccgccacccctccgggctccgtcactgtgccccatcctaacatgaggaggttgctctgtccaccaccggagagattcctttctatggcaaggctatccccctcgaagtaatcaaaggggggagacatctcattttttgtcactcaaagaagaagtgcgacgagctcgccgcaaagctagtcgcatgggcatcaatgccgtggcctactaccgcggtcttgacgtgtccgtcatcccgaccagcggcgatgttgtcgtcgtggcaactgatgctctcatgaccggctttaccggcgacttcgactcggtgatgactgcaacacgtgtgtcacccagacggtcgacttcagccttgaccctactttcaccattgagacaaccacgcttccccaggatgctgtctcccgcactcaacgtcggggtaggactggcagggggaagccaggcatctacgatttgtggcaccgggggagcgcccctccggcatgttcgactcgtccatcctctgtgagtgctatgacgcgggctgtgcttggtatgagctcacgcccgccgagactacagttagactacgagcgtaatgaacaccccggggcttcccgtgtgccaagaccatcttgaattttgggagggcgtcttcacaggcctcactcatatagatgcccacttcctatcccaaacaaagcagagtggggagaatcttccttacctggtagcgtacaagccaccgtgtgcgctagggctcaagcccctcccccatcgtgggaccagatgtggaagtgtttgatccgcctcaaacccaccctccatgggccaacacctctgctatacagactgggcgctgtccaaatgaggtcaccctgacgcacccagtcaccaaatacattatga

SEQ ID NO: 34 - DNA, 4853 bp, Hepatitis C virus
tcgcccacaggacgttaagttcccgggtggcggtcagatcgttggtggagtttacttgttgccgcgcaggggccctagaatgggtgtgcgcgcgccgaggaagacttccgagcggtcgcaacctcgagtagacgtcagcctatccccaaggcacgtcggcccgagggtaggacctgggctcagcccgggtacccttggcccctctatggcaatgagggctgcgggtgggcgggatggctcctgtctccccgcggtctcggcctagttggggccccacagacccccggcgtaggtcgcgcaatttgggtaaggtcatcgatacccttacgtgcggcttcgccgacctcatggggtacataccgctcgtcggcgcccctcttggaggcgctgccaggccctggcgcatggcgtccgggttctggaagacggcgtgaactatgcaacggggaaccttcccggttgctctttctctatcttccttctggccctgctctcttgtctgactgtgcccgcttcggcctacaagtgcgcaactccacggggctttaccacgtcaccaatgattgccccaactcgagtattgtgtacgaggcgcctgatgccatcctgcacactccggggtgtgtcccttgcgttcgcgagggtaacgcctcgaggtgttggtggcgatgacccccacggtggccaccagggacggcaaactccctgcaacgcagctccgacgtcacatcgatctgcttgtcgggagtgccaccctctgttcggccctctacgtgggggacctgtgcggtctgtctttcttgttggtcaactgtttaccttctctcccaggcgccactggacgacgcaagactgcaattgttctatctatcccggccatataacgggccaccgcatggcatgggatatgatgatgaactggtccccgacgcggcgttggtaatggctcagctgctccggatcccgcaagccatcttggatatgatcgctggtgcccactggggagtcctggcgggcatagcgtatttctccatggtggggaactgggcgaaggtcctgtagtgctgctgctatttgccggcgtcgatgcgggaaccgtcgtcaccggaggggtcgccgcccgcaccgcgtatggatttactagtctcttcacgcgaggcgcccagcagaacatccagctgatcaacaccaacggcagtggcacatcaataggacggccttgaactgcaacgacagccttaacaccggctggttagcagggcttttctatcggaacaacttcaactcttcaggctgtcctcagaggttggccagctgccggcgcctgccgattttgcccagggctggggccctatcagccatgccaacggcagcggccccgaccaccgcccctactgctggcactaccccccaaaaccttgcggcattgtgcccgcacagaacgtgtgtggcccggtatattgcttcctcccagccccgtggcggtgggaacgaccgacagggcgggcatccctacctacagctggggtgaaaatgatacggacgtcttcgtccttaacaacaccaggccaccgctgggcaattggtttggttgacctggatgaactcaactggattcaccaaagtgtgtggagcgcccccttgtgtcatcggaggggtgggcaacaacaccttgcactgccccactgattgtttccgcaagcatccggaagccacatactcccggtgcggctccgtccctggattacacccagatgcctggtcgactacccgtataggctttggcattatccttgtaccatcaactataccatattcaaagtcaggatgtatgtgggaggggtcgagcataggctggatgcgcctgcaactggacgcggggcgaacgttgcgatctggaagacagggacaggtccgagctcagcccgttgctgctgtccactacacagtggcaggtccttccgtgttccttcacgaccttgccagccttgtccaccggtctctccacctccaccagaacatcgtggacgtgcagtacctgtacggggtggggtcaagcatcgcgtcctgggccatcaagtgggagtacgtcgttctcctgttccttctgcttgcagacgcgcgcgtctgtcctgcctgtggatgatgctactcatatcccaagcggaggcggctttggagaacctcgtaatactcaatgcagcatccctggccgggacgcaaggtcttgtatccttcctcgtgttcttctgctttgcatggtatctgaaggtaggtgggtgccaggagcggtttacgccctctacggaatgtggcctctcctcctgctcctgctggcgttgccccagcgggcatacgcgctggacacggaggtggccgcgtcgtgtggcggcgttgtctcgtcgggttgatggcgctgactctgtcaccgtattacaagcgctacatcagctggtgcttatggtggctccagtattttctgactagagcagaagcgcaactgcacgtgtgggttccccccctcaacgttcgagggggggcgacgccgtcatcttactcatgtgtgttgtacacccgactttggtatttgacatcaccaaactactgctggccgtcctcggacccctttggattcttcaagccagtttgcttaaagtaccctacttgtgcgcgtccaaggccttctccggatctgcgcgttagcgcggaagatggtcgggggccaatacgtgcaaatggttatcatcaagttagggacgcttactggcacctatgtttacaaccatctcactcctcttcgggactggcgcacaacggcctgcgagatctggccgtggctgtagagccagtcgtcttctcccaaatggagaccaagctcatcacgtggggggcagacactgccgcgtgcggtgacatcatcaacggtctgcccgttccgcccgtaggggtcgggagatactgctcggaccagccgatggaatggtctccaaggggtggaggttgctggcgcccatcacggcgtacgcccagcagacaaggggcctcctagggtgcataatcaccagcctaaccggcgggacaaaaaccaagtggagggtgaggtccagattgtgtcaactgctgcccaaactttcctggcaacgtgcatcagtggggtatgctggactgtctaccacggggccggaacgaggactattgcatctccaaaggccccgttatccagatgtataccaatgtggacaaagaccttgtgggctggcccgctcctcaaggtgcccgctcattgacaccctgcacctgcggctcctcggacctttacctggtcacgaggcatgccgatgtctccccgtgcgccggcggggtgatagcaggggcagcctgctctcgccccggcccatttcctacttgaaaggctcctcggggggcccgctgttgtgccccgcgggacacgccgtaggcatattcagggcgcggtgtgcacccgtggagtggctaaggcggtggactttatccctgtggagaacctagagacaaccatgaggtccccggtgttcacggacaactcctctccgccagcagtgccccagagcttccaggtggcccacctgcatctcccacaggcagcggcaagagcaccaaggtcccggctgcatacgcggctcagggctataaggtgctagtgctcaacccttctgttgctgcaacattgggctttggtgcttacatgtccaaggcccagggatcgatcctaatatcaggaccggggcgagaacaattactactggcagccccatcacgtactccacctacggtaagttccttgccgacggcgggtgctcggggggcgcttatgatataataatttgtgacgagtgccacccacggatgccacatccatcttgggcatcggcactgtccttgaccaggcagagaccgcgggggcgagactggttgtgctcgccaccgccacccctccgggctccgtcactgtgccccaccccaacatgaggaggttgctctgtccaccaccggagagattcctttctatggcaaggctatccccctcgaagtaatcaaaggggggagacatctcattttttgtcactcaaagaagaagtgcgacgagctcgccgcaaagctggtcgcatgggcatcaatgccgtggcctactaccgcggtcttgatgtgtctgtcatcccgaccagcggcgatgttgtcgtcgtggcaactgatgctctcatgaccggctttaccggcgacttcgactcggtgatgactgcaacacgtgtgtcacccagacggtcgatttcagccttgaccctaccttcaccattgagacaaccacgcttccccaagacgctgtctcccgcactcaacgtcggggcaggactggcagggggaagccaggcatctacgatttgtggcaccgggggagcgcccttccggcatgttcgactcgtccgtcctctgtgagtgctatgacgcgggctgtgcttggtatgagctcacgcccgccgagactacagttagactacgagcgtaatgaacaccccggggcttcccgtgtgccaagaccatctcgaattttgggagggcgtcttcacaggcctcactcatatagatgcccacttcctatcccagacaaagcagagtggggagaatcttccttacctggtagcgtacaagccaccgtgtgcgctagggctcaagcccctcccccatcgtgggaccagatgtggaagtgtttgatccgcctcaaacccaccctccatgggccaacacctctgctatacagactgggcgctgtccaaatgaggtcaccttgacgcacccagtcactaaatacatcatga

SEQ ID NO: 35 - DNA, 4853 bp, Hepatitis C virus
tcgcccacaggacgttaagttcccgggtggcggtcagatcgttggtggagtttacttgttgccgcgcaggggccctagaatgggtgtgcgcgcgccgaggaagacttccgagcggtcgcaacctcgagtagacgtcagcctgtccccaaggcacgtcggcccgagggcaggacctgggctcagcccgggtacccttggcccctctatggcaatgagggctgcgggtgggcgggatggctcctgtccccccgcggtctcggcctagttggggccccacagacccccggcgtaggtcgcgcaatttgggtaaggtcatcgacacccttacgtgcggcttcgccgacctcatggggtacataccgctcgtcggcgcccctcttggaggcgctgccaggccctggcgcatggcgttcgggttctggaagacggcgtgaactatgcaacagggaaccttcctggttgctctttctctatcttctttctggccctgctctcttgtctgactgtgcccgcttcggcctacaagtgcgcaactctacagggctctaccacgtcaccaatgattgccctaactcgagtattgtgtacgaggcgcctgatgccatcctgcacactccggggtgtgtcccttgcgttcgcgagggtaacgcctcgaggtgttggtggcgatgacccccacggtggccaccagggacggcaaactccccgcgacgcagcttcgacgtcacatcgatctgcttgtcgggagcgccaccctctgttcggctctttacgtgggggacctgtgcggtctgtctttcttgtgggtcaactgtttaccttctcccccaggcgccactggacgacgcaagactgcaattgctctatctatcccggccatataacgggtcaccgcatggcatgggatatgatgatgaactggtccccgacgcggcgttggtaatggctcagctgctccggatcccgcaagccatcttggacatgatcgctggtgcccactggggagtcttggcgggcatagcgtatttctccatggtggggaactgggcgaaggtcctgtagtgctgctgctattcgccggcgtcgacgcggaaaccatgaccaccgggggggccgccgctcgcaacgtgtatagaatttccagcttcttctcgccgggcccccagcagaacatccagctgatcaacaccaacggcagtggcacatcaataggacggccttgaactgcaacgacagccttaacaccggctggttagcagggcttttctatcatcgcagcttcaactcttcaggctgtcctgcgaggctggccagctgccgacgcctaccgactttgcccagggctggggccctatcagccatgccaacggcagcggccccgaccaacgcccctactgttggcactaccccccaaaaccttgcggtattgtgcccgcacggaacgtgtgtggcccggtatattgcttccccccagtcccgtggcggtgggaacgaccgacagggcgggcgtccctacctaccgctggggtgaaaatgaaacggacgtcttcgtccttaacaacaccaggccaccgctgggcaattggttcggttgacctggatgaattcaactggattcaccaaagtgtgcggagcgcctccttgtgtcatcggaggagtgggcaacgacaccttgtactgccccactgattgtttccgcaagcatccggaagccacatattcccggtgcggctccgtccctggattacacccagatgcctggttgactacccgtataggctttggcattatccttgtaccgtcaactacaccatattcaaagtcaggatgtatgtgggaggggtcgagcataggctggatgcgcctgcaactggacgcggggcgaacgttgcgatctggaagacagggacaggtccgagctcagcccgttgctgctgtccactacacagtggcaggtccttccgtgctccttcacgaccttgccagccttgtccaccggcctctccacctccaccagaacattgtggacgtgcagtacctgtacggggtagggtcaagcatcgcgtcctgggccattaagtgggagtacgtcgttctcctgttccttctgcttgcagacgcgcgcgtctgtcctgcctgtggatgatgctactcatatcccaagcggaggcggctttggagaacctcgtaatactcaatgcagcatccctggccgggacgcaaggtcttgtatccttcctcgtgttcttctgctttgcgtggtatctgaaggtaggtgggtgccaggagcggtttacgccctctacggaatgtggcctctcctcctgctcctgttggcgttgccccagcgggcatacgcgctggacacggaggtggccgcgtcgtgtggcggcgttgtcttgtcgggttgatgatactgactctgtcaccgtattacaagcgctatatcagctggtgcttatggtggcttcagtattttctgactagggcagaagcgcaactgcacgtgtgggttccccccctcaacgttcgagggggggcgacgctgccatcttactcacatgcgttgtacacccgactctggtatttgacatcaccaaactactgctggctgtcctcggacccctttggattcttcaagccagtttgcttaaagtaccctacttgtgcgcgtccaaggccttctccggatctgcgcgttagcgcggaagatggtcggaggccactacgtgcaaatggttatcatcaagttagggatgcttactggcacctatgtttataaccatctcacccccctccgggactggcgcacaacggcctgcgagatctggccgtggctgtagaaccagtcgtcttctcccaaatggagaccaagctcatcacgtggggggcagacactgccgcgtgcggtgacatcatcaacggcttgcccgttccgcccgtaggggccaggagatactgctcggaccagccgatggaatggtctccaaggggtggaggttgctggcgcccatcacggcgtacgcccagcagacaaggggcctcctagggtgcataatcaccagcctaaccggcgggataaaaaccaagtggagggtgaggtccagattgtgtcaactgctgcccaaactttcctggcaacgtgcatcagtggggtatgctggactgtctaccacggggccggaacgaggactattgcatctccaaaggccctgttatccagatgtataccaatgtggacaaagaccttgtgggctggcccgctcctcaaggtgcccgctcattgacaccctgcacctgcggctcctcggacctttacctggtcacgaggcatgccgatgtctccccgtgcgccggcggggtgatagcaggggcagcctgctctcgccccggcccatttcctatctgaaaggctcctcggggggcccgctgttgtgccccgcgggacacgccgtaggcatattcagggcgcggtgtgcacccgtggagtggctaaggcggtggactttatccctgtggagaacctagagacaaccatgaggtccccggtgttcacggacaactcctctccgccagcagtgccccagagcttccaggtggcccacctgcatctcccacaggcagcggcaagagcaccaaggtcccggctgcgtatgcggctcagggctataaggtgctagtactcaacccctctgtcgctgcaacactgggctttggtgcttatatgtccaaggcccagggatcgatcctaatatcaggaccggggcgagaacaattaccactggcagccccatcacgtactccacctacggcaaatttcttgccgacggcgggtgctcggggggcgcttatgatataataatttgtgacgagtgccatccacggatgccacatccatcttgggcatcggcactgtccttgaccaggcagagaccgcgggggcgagactggttgtgctcgccaccgccacccctccgggctccgtcactgtgccccatcctaacatgaggaggttgctctgtccaccaccggagagattcctttctatggcaaggctatccccctcgaagtaatcaaaggggggagacatctcattttttgtcactcaaagaagaagtgcgacgagctcgccgcaaagctagtcgcatgggcatcaatgccgtggcctactaccgcggtcttgacgtgtccgtcatcccgaccagcggcgatgttgtcgtcgtggcaactgatgctctcatgaccggctttaccggcgacttcgactcggtgatgactgcaacacgtgtgtcacccagacggtcgacttcagccttgaccctactttcaccattgagacaaccacgcttccccaggatgctgtctcccgcactcaacgtcggggtaggactggcagggggaagccaggcatctacgatttgtggcaccgggggagcgcccctccggcatgttcgactcgtccatcctctgtgagtgctatgacgcgggctgtgcttggtatgagctcacgcccgccgagactacagttagactacgagcgtaatgaacaccccggggcttcccgtgtgccaagaccatcttgaattttgggagggcgtcttcacaggcctcactcatatagatgcccacttcctatcccaaacaaagcagagtggggagaatcttccttacctggtagcgtacaagccaccgtgtgcgctagggctcaagcccctcccccatcgtgggaccagatgtggaagtgtttgatccgcctcaaacccaccctccatgggccaacacctctgctatacagactgggcgctgtccaaatgaggtcaccctgacgcacccagtcaccaaatacattatga

SEQ ID NO: 36 - DNA, 4853 bp, Hepatitis C virus; identical to SEQ ID NO: 34

SEQ ID NO: 37 - DNA, 4853 bp, Hepatitis C virus; identical to SEQ ID NO: 34

SEQ ID NO: 38 - DNA, 4853 bp, Hepatitis C virus; identical to SEQ ID NO: 23

SEQ ID NO: 39 - DNA, 4853 bp, Hepatitis C virus; identical to SEQ ID NO: 23

SEQ ID NO: 40 - DNA, 4853 bp, Hepatitis C virus
tcgcccacaggacgttaagttcccgggtggcggtcagatcgttggtggagtttacttgttgccgcgcaggggccctagaatgggtgtgcgcgcgccgaggaagacttccgagcggtcgcaacctcgagtagacgtcagcctatccccaaggcacgtcggcccgagggtaggacctgggctcagcccgggtacccttggcccctctatggcaatgagggctgcgggtgggcgggatggctcctgtctccccgcggtctcggcctagttggggccccacagacccccggcgtaggtcgcgcaatttgggtaaggtcatcgatacccttacgtgcggcttcgccgacctcatggggtacataccgctcgtcggcgcccctcttggaggcgctgccaggccctggcgcatggcgtccgggttctggaagacggcgtgaactatgcaacggggaaccttcccggttgctctttctctatcttccttctggccctgctctcttgtctgactgtgcccgcttcggcctacaagtgcgcaactccacggggctttaccacgtcaccaatgattgccccaactcgagtattgtgtacgaggcgcctgatgccatcctgcacactccggggtgtgtcccttgcgttcgcgagggtaacgcctcgaggtgttggtggcgatgacccccacggtggccaccagggacggcaaactccctgcaacgcagctccgacgtcacatcgatctgcttgtcgggagtgccaccctctgttcggccctctacgtgggggacctgtgcggtctgtctttcttgttggtcaactggttaccttctctcccaggcgccactggacgacgcaagactgcaattgttctatctatcccggccatataacgggccaccgcatggcatgggatatgatgatgaactggtccccgacgcggcgttggtaatggctcagctgctccggatcccgcaagccatcttggatatgatcgctggtgcccactggggagtcctggcgggcatagcgtatttctccatggtggggaactgggcgaaggtcctgtagtgctgctgctatttgccggcgtcgatgcgggaaccgtcgtcaccggaggggtcgccgcccgcaccgcgtatggatttactagtctcttcacgcgaggcgcccagcagaacatccagctgatcaacaccaacggcagtggcacatcaataggacggccttgaactgcaacgacagccttaacaccggctggttagcagggcttttctatcggaacaacttcaactcttcaggctgtcctcagaggttggccagctgccggcgcctgccgattttgcccagggctggggccctatcagccatgccaacggcagcggccccgaccaccgcccctactgctggcactaccccccaaaaccttgcggcattgtgcccgcacagaacgtgtgtggcccggtatattgcttcctcccagccccgtggcggtgggaacgaccgacagggcgggcatccctacctacagctggggtgaaaatgatacggacgtcttcgtccttaacaacaccaggccaccgctgggcaattggtttggttgacctggatgaactcaactggattcaccaaagtgtgtggagcgcccccttgtgtcatcggaggggtgggcaacaacaccttgcactgccccactgattgtttccgcaagcatccggaagccacatactcccggtgcggctccgtccctggattacacccagatgcctggtcgactacccgtataggctttggcattatccttgtaccatcaactataccatattcaaagtcaggatgtatgtgggaggggtcgagcataggctggatgcgcctgcaactggacgcggggcgaacgttgcgatctggaagacagggacaggtccgagctcagcccgttgctgctgtccactacacagtggcaggtccttccgtgttccttcacgaccttgccagccttgtccaccggtctctccacctccaccagaacatcgtggacgtgcagtacctgtacggggtggggtcaagcatcgcgtcctgggccatcaagtgggagtacgtcgttctcctgttccttctgcttgcagacgcgcgcgtctgtcctgcctgtggatgatgctactcatatcccaagcggaggcggctttggagaacctcgtaatactcaatgcagcatccctggccgggacgcaaggtcttgtatccttcctcgtgttcttctgctttgcatggtatctgaaggtaggtgggtgccaggagcggtttacgccctctacggaatgtggcctctcctcctgctcctgctggcgttgccccagcgggcatacgcgctggacacggaggtggccgcgtcgtgtggcggcgttgtctcgtcgggttgatggcgctgactctgtcaccgtattacaagcgctacatcagctggtgcttatggtggctccagtattttctgactagagcagaagcgcaactgcacgtgtgggttccccccctcaacgttcgagggggggcgacgccgtcatcttactcatgtgtgttgtacacccgactttggtatttgacatcaccaaactactgctggccgtcctcggacccctttggattcttcaagccagtttgcttaaagtaccctacttgtgcgcgtccaaggccttctccggatctgcgcgttagcgcggaagatggtcgggggccaatacgtgcaaatggttatcatcaagttagggacgcttactggcacctatgtttacaaccatctcactcctcttcgggactggcgcacaacggcctgcgagatctggccgtggctgtagagccagtcgtcttctcccaaatggagaccaagctcatcacgtggggggcagacactgccgcgtgcggtgacatcatcaacggtctgcccgttccgcccgtaggggtcgggagatactgctcggaccagccgatggaatggtctccaaggggtggaggttgctggcgcccatcacggcgtacgcccagcagacaaggggcctcctagggtgcataatcaccagcctaaccggcgggacaaaaaccaagtggagggtgaggtccagattgtgtcaactgctgcccaaactttcctggcaacgtgcatcagcggggtatgctggactgtctaccacggggccggaacgaggactattgcatctccaaaggccccgttatccagatgtataccaatgtggacaaagaccttgtgggctggcccgctcctcaaggtgcccgctcattgacaccctgcacctgcggctcctcggacctttacctggtcacgaggcatgccgatgtctccccgtgcgccggcggggtgatagcaggggcagcctgctctcgccccggcccatttcctacttgaaaggctcctcggggggcccgctgttgtgccccgcgggacacgccgtaggcatattcagggcgcggtgtgcacccgtggagtggctaaggcggtggactttatccctgtggagaacctagagacaaccatgaggtccccggtgttcacggacaactcctctccgccagcagtgccccagagcttccaggtggcccacctgcatctcccacaggcagcggcaagagcaccaaggtcccggctgcatacgcggctcagggctataaggtgctagtgctcaacccttctgttgctgcaacattgggctttggtgcttacatgtccaaggcccagggaccgatcctaatatcaggaccggggcgagaacaattactactggcagccccatcacgtactccacctacggtaagttccttgccgacggcgggtgctcggggggcgcttatgatataataatttgtgacgagtgccacccacggatgccacatccatcttgggcatcggcactgtccttgaccaggcagagaccgcgggggcgagactggttgtgctcgccaccgccacccctccgggctccgtcactgtgccccaccccaacatgaggaggttgctctgtccaccaccggagagattcctttctatggcaaggctatccccctcgaagtaatcaaaggggggagacatctcattttttgtcactcaaagaagaagtgcgacgagctcgccgcaaagctggtcgcatgggcatcaatgccgtggcctactaccgcggtcttgatgtgtctgtcatcccgaccagcggcgatgttgtcgtcgtggcaactgatgctctcatgaccggctttaccggcgacttcgactcggtgatgactgcaacacgtgtgtcacccagacggtcgatttcagccttgaccctaccttcaccattgagacaaccacgcttccccaagacgctgtctcccgcactcaacgtcggggcaggactggcagggggaagccaggcatctacgatttgtggcaccgggggagcgcccttccggcatgttcgactcgtccgtcctctgtgagtgctgtgacgcgggctgtgcttggtatgagctcacgcccgccgagactacagttagactacgagcgtaatgaacaccccggggcttcccgtgtgccaagaccatctcgaattttgggagggcgtcttcacaggcctcactcatatagatgcccacttcctatcccagacaaagcagagtggggagaatcttccttacctggtagcgtacaagccaccgtgtgcgctagggctcaagcccctcccccatcgtgggaccagatgtggaagtgtttgatccgcctcaaacccaccctccatgggccaacacctctgctatacagactgggcgctgtccaaatgaggtcaccttgacgcacccagtcactaaatacatcatga

SEQ ID NO: 41 - DNA, 4853 bp, Hepatitis C virus
tcgcccacaggacgttaagttcccgggtggcggtcagatcgttggtggagtttacttgttgccgcgcaggggccctagaatgggtgtgcgcgcgccgaggaagacttccgagcggtcgcaacctcgagtagacgtcagcctatccccaaggcacgtcggcccgagggcaggacctgggctcagcccgggtacccttggcccctctatggcaatgagggctgcgggtgggcgggatggctcctgtctccccgcggtctcggcctagttggggccccacagacccccggcgtaggtcgcgcaatttgggtaaggtcatcgatacccttacgtgcggcttcgccgacctcatggggtacataccgctcgtcggcgcccctcttggaggcgctgccaggccctggcgcatggcgtccgggtcctggaagacggcgtgaactatgcaacagggaaccttcctggttgctctttctctatcttccttctggccctgctctcttgtctgactgtgcccgcttcggcctacaagtgcgcaactccacggggctctatcacgtcaccaatgattgccctaactcgagtattgtgtacgaggcgcctgatgccatcctgcacactccggggtgtgtcccttgcgttcgcgagggtaatgcctcgaggtgttggtggcgatgacccccacggtggccaccagggacggcaaactccctgcgacgcagctccgacgtcacatcgatctgcttgtcgggagcgccaccctctgttcggccctctacgtgggggacctgtgcggtctgtctttcttgttggtcaactgtttaccttctctcccaggcgccactggacgacgcaagactgcaattgttctatctatcccggccatataacgggccaccgcatggcatgggatatgatgatgaactggtccccgacgcagcgttggtaatggctcagctgctccggatcccgcaagccatcttggacatgatcgctggtgctcactggggagtcctggcgggcatagcgtatttctccatggtggggaactgggcgaaggtcctgtagtgctgttgctattcgccggcgtcgatgcggaaaccgtcgtcaccggggggaccgccgctcgcaacgcgtacggactctctagtctcttcatgcggggccccaagcagaacatccagctgatcaacaccaacggcagtggcacatcaataggacggccttgaactgcaacgatagccttaacaccggctggctagcagggcttttctatcagcacaacttcaactcttcaggctgtcctgagaggctggccagctgccgacgcctgccgattttgcccagggctggggccctatcagccatgccaacggcagcggccccgaccaccgcccctactgctggcactaccccccaaaaccttgcggtattgtgcccgcacagaacgtgtgtggtccggtatattgcttcctcccagccccgtggcggtgggaacgaccgacaggtcgggcgtccctacctaccgctggggtgaaaatgagacggacgtcttcgtccttaacaacaccaggccaccgctgggcaattggtttggttgacctggatgaactcaactggattcaccaaagtgtgcggagcgcctccttgtgtcatcggaggggcgggcaacaacaccttgcactgccccaccgattgtttccgcaagcatccggaagccacatactcccggtgcggctccgtccctggattacacccagatgcatggtcgactacccgtataggctttggcattatccttgtaccatcaactataccatatttaaagtcaggatgtacgtgggaggggtcgagcataggctggatgtgcctgcaactggacgcggggcgaacgctgcgatctggaagacagggacaggtccgagctcagcccgttgctgctgtccaccacacagtggcaggtccttccgtgttccttcacgaccttgccggccttgtccaccggcctctccacctccaccagaacatcgtggacgtacagtacctgtacggggtggggtcaagcattgcgtcctgggccattaagtgggagtacgtcgttctcctgttccttctgcttgcagacgcgcgcgtctgtcctgcctgtggatgatgctactcatatcccaagcggaggcggctttggagaacctcgtaacactcaatgcagcatccctggccgggacgcaaggtcttgtatccttcctcgtgttcttctgtttcgcgtggtatctgaaggtaggtgggtgccaggagcggtttacgccctctacgggatgtggcctctcctcctgctcctgttggcgttgccccagcgggcatacgcgctggacacggaggtggccgcgtcgtgtggcggcgttgtctcgtcgggttgatggcgctgactctgtcaccgtattacaagcgctacatcagctggtgcttatggtggctccagtattttctgactagagcagaagcgcaactgcacgtatgggttccccccctcaacgctcgagggggggcgacgctgtcatcttactcatgtgtgttgtacacccgactttggtatttgacatcaccaaactactgctggccgtcctcggacccctttggattcttcaagccagtctgcttaaagtaccctacttgtgcgcgtccagggccttctccggatctgcgcgttagcgcggaagatggttgggggccactacgtgcaaatggttatcatcaagctagggacgcttactggcacctatgtttacaaccatctcactcctcttcgggactggcgcacaacggcctgcgagatctggccgtggctgtagagccagtcgtcttctcccaaatggagaccaagctcatcacatggggggcagacactgccgcgtgcggtgacatcatcaacggcttgcccgttccgcccgtaggggccgggagatactgctcggaccagccgatggaatggtctccaaggggtggaggttgctggcgcccatcacggcgtacgcccagcagacaaggggcctcttaggatgcataatcaccagcctgaccggcgggacaaaaaccaagtggagggtgaagtccagattgtgtcaactgctgcccaaactttcctcgcaacgtgcatcagtggggtatgctggactgtctaccacggggccggaacgaggactattgcatctccaaaggccctgttatccagatgtataccaatgtggacaaagaccttgtgggctggcccgcccctcaaggtgcccgctcattgacgccctgcacctgcggctcctcggacctttacctggtcacgaggcatgccgatgtctccccgtgcgccggcggggtgatagcaggggcagcctgctttcgccccggcccatttcctatttgaaaggttcctcggggggcccgctgttgtgccccgcgggacacgccgtaggcatattcagggcgcggtgtgcacccgtggagtggctaaggcggtggactttatccccgtggagaacctagagacaaccatgaggtccccggtgtttacggacaactcctctccgccagcagtgccccagagcttccaggtggcccacctgcatctcccacgggcagcggcaagagcaccaaggtcccagctgcatatgcggctcagggctataaagtgctagtgctcaacccctctgttgctgcaacactgggctttggtgcttatatgtccaaggcccagggattgatcctaacatcaggaccggggcgagaacaattaccactggcagccccatcacgtactccacctacggcaagttccttgccgacggcgggtgctcggggggcgcctatgatataataatttgtgacgagtgccacccacggatgccacatccatcttgggcatcggcactgtccttgaccaggcagagaccgcgggggcgagactagttgtgctcgccaccgccacccctccgggctccatcactgtgccccatcctaacatgaggaggttgctctgtccaccaccggagagattcctttctatggcaaggctatccccctcgaagtaatcaaaggggggagacatctcattttttgtcactcaaagaagaagtgcgatgagctcgccgcaaagctggtcgcatgggcatcaatgccgtggcctactaccgcggtcttgacgtgtccgtcatcccgaccagcggcgatgttgtcgtcgtggcaactgatgctctcatgaccggttttaccggcgacttcgactcggtgatgactgcaacacgtgtgtcacccagacggtcgatttcagccttgaccctaccttcaccattgagacaaccacgcttccccaagatgctgtctcccgcactcagcgtcggggcaggactggcagggggaagccaggcatctacggtttgtggcaccaggggagcgcccttccggcatgttcgactcgtccatcctctgtgagtgctatgacgcgggttgtgcttggtatgagctcacacccgccgagactacagttagactacgagcgtaatgaacaccccggggcttcccgtgtgccaagaccatctcgaattttgggagggggtcttcacaggcctcactcatatagatgcccacttcctatcccagacaaagcagagtggggagaatcttccttacctggtagcgtacaagccaccgtgtgcgctagggctcaagcccctcccccatcgtgggaccagatgtggaagtgtttgatccgcctcaaacccacccttcatgggccaacacctctgctatacagactgggtgctgtccaaatgaggtcaccctgacgcacccagtcaccaaatatatcatga

SEQ ID NO: 42 - DNA, 4853 bp, Hepatitis C virus; identical to SEQ ID NO: 23

SEQ ID NO: 43 - DNA, 4853 bp, Hepatitis C virus; identical to SEQ ID NO: 23

SEQ ID NO: 44 - DNA, 4853 bp, Hepatitis C virus
tcgcccacaggacgttaagttcccgggtggcggtcagatcgttggtggagtttacttgttgccgcgcaggggccctagaatgggtgtgcgcgcgccgaggaagacttccgagcggtcgcaacctcgagtagacgtcagcctatccccaaggcacgtcggcccgagggtaggacctgggctcagcccgggtacccttggcccctctatggcaatgagggctgcgggtgggcgggatggctcctgtctccccgcggtctcggcctagttggggccccacagacccccggcgtaggtcgcgcaatttgggtaaggtcatcgatacccttacgtgcggcttcgccgacctcatggggtacataccgctcgtcggcgcccctcttggaggcgctgccaggccctggcgcatggcgtccgggttctggaagacggcgtgaactatgcaacggggaaccttcccggttgctctttctctatcttccttctggccctgctctcttgtctgactgtgcccgcttcggcctacaagtgcgcaactccacggggctttaccacgtcaccaatgattgccccaactcgagtattgtgtacgaggcgcctgatgccatcctgcacactccggggtgtgtcccttgcgttcgcgagggtaacgcctcgaggtgttggtggcgatgacccccacggtggccaccagggacggcaaactccctgcaacgcagctccgacgtcacatcgatctgcttgtcgggagtgccaccctctgttcggccctctacgtgggggacctgtgcggtctgtctttcttgttggtcaactgtttaccttctctcccaggcgccactggacgacgcaagactgcaattgttctatctatcccggccatataacgggccaccgcatggcatgggatatgatgatgaactggtccccgacgcggcgttggtaatggctcagctgctccgggtcccgcaagccatcttggatatgatcgctggtgcccactggggagtcctggcgggcatagcgtatttctccatggtggggaactgggcgaaggtcctgtagtgctgctgctatttgccggcgtcgatgcgggaaccgtcgtcaccggaggggtcgccgcccgcaccgcgtatggatttactagtctcttcacgcgaggcgcccagcagaacatccagctgatcaacaccaacggcagtggcacatcaataggacggccttgaactgcaacgacagccttaacaccggctggttagcagggcttttctatcggaacaacttcaactcctcaggctgtcctcagaggttggccagctgccggcgcctgccgattttgcccagggctggggccctatcagccatgccaacggcagcggccccgaccaccgcccctactgctggcactaccccccaaaaccttgcggcattgtgcccgcacagaacgtgtgtggcccggtatattgcttcctcccagccccgtggcggtgggaacgaccgacagggcgggcatccctacctacagctggggtgaaaatgatacggacgtcttcgtccttaacaacaccaggccaccgctgggcaattggtttggttgacctggatgaactcaactggattcaccaaagtgtgtggagcgcccccttgtgtcatcggaggggtgggcaacaacaccttgcactgccccactgattgtttccgcaagcatccggaagccacatactcccggtgcggctccgtccctggattacacccagatgcctggtcgactacccgtataggctttggcattatccttgtaccatcaactataccatattcaaagtcaggatgtatgtgggaggggtcgagcataggctggatgcgcctgcaactggacgcggggcgaacgttgcgatctggaagacagggacaggtccgagctcagcccgttgctgctgtccactacacagtggcaggtccttccgtgttccttcacgaccttgccagccttgtccaccggtctctccacctccaccagaacatcgtggacgtgcagtacctgtacggggtggggtcaagcatcgcgtcctgggccatcaagtgggagtacgtcgttctcctgttccttctgcttgcagacgcgcgcgtctgtcctgcctgtggatgatgctactcatatcccaagcggaggcggctttggagaacctcgtaatactcaatgcagcatccctggccgggacgcaaggtcttgtatccttcctcgtgttcttctgctttgcatggtatctgaaggtaggtgggtgccaggagcggtttacgccctctacggaatgtggcctctcctcctgctcctgctggcgttgccccagcgggcatacgcgctggacacggaggtggccgcgtcgtgtggcggcgttgtctcgtcgggttgatggcgctgactctgtcaccgtattacaagcgctacatcagctggtgcttatggtggctccagtattttctgactagagcagaagcgcaactgcacgtgtgggttccccccctcaacgttcgagggggggcgacgccgtcatcttactcatgtgtgttgtacacccgactttggtatttgacatcaccaaactactgctggccgtcctcggacccctttggattcttcaagccagtttgcttaaagtaccctacttgtgcgcgtccaaggccttctccggatctgcgcgttagcgcggaagatggtcgggggccaatacgtgcaaatggttatcatcaagttagggacgcttactggcacctatgtttacaaccatctcactcctcttcgggactggcgcacaacggcctgcgagatctggccgtggctgtagagccagtcgtcttctcccaaatggagaccaagctcatcacgtggggggcagacactgccgcgtgcggtgacatcatcaacggtctgcccgttccgcccgtaggggtcgggagatactgctcggaccagccgatggaatggtctccaaggggtggaggttgctggcgcccatcacggcgtacgcccagcagacaaggggcctcctagggtgcataatcaccagcctaaccggcgggacaaaaaccaagtggagggtgaggtccagattgtgtcaactgctgcccaaactttcctggcaacgtgcatcagtggggtatgctggactgtctaccacggggccggaacgaggactattgcatctccaaaggccccgttatccagatgtataccaatgtggacaaagaccttgtgggctggcccgctcctcaaggtgcccgctcattgacaccctgcacctgcggctcctcggacctttacctggtcacgaggcatgccgatgtctccccgtgcgccggcggggtgatagcaggggcagcctgctctcgccccggcccatttcctacttgaaaggctcctcggggggcccgctgttgtgccccgcgggacacgccgtaggcatattcagggcgcggtgtgcacccgtggagtggctaaggcggtggactttatccctgtggagaacctagagacaaccatgaggtccccggtgttcacggacaactcctctccgccagcagtgccccagagcttccaggtggcccacctgcatctcccacaggcagcggcaagagcaccaaggtcccggctgcatacgcggctcagggctataaggtgctagtgctcaacccttctgttgctgcaacattgggctttggtgcttacatgtccaaggcccagggatcgatcctaatatcaggaccggggcgagaacaattactactggcagccccatcacgtactccacctacggtaagttccttgccgacggcgggtgctcggggggcgcttatgatataataatttgtgacgagtgccacccacggatgccacatccatcttgggcatcggcactgtccttgaccaggcagagaccgcgggggcgagactggttgtgctcgccaccgccacccctccgggctccgtcactgtgccccaccccaacatgaggaggttgctctgtccaccaccggagagattcctttctatggcaaggctatccccctcgaagtaatcaaaggggggagacatctcattttttgtcactcaaagaagaagtgcgacgagctcgccgcaaagctggtcgcatgggcatcaatgccgtggcctactaccgcggtcttgatgtgtctgtcatcccgaccagcggcgatgttgtcgtcgtggcaactgatgctctcatgaccggctttaccggcgacttcgactcggtgatgactgcaacacgtgtgtcacccagacggtcgatttcagccttgaccctaccttcaccattgagacaaccacgcttccccaagacgctgtctcccgcactcaacgtcggggcaggactggcagggggaagccaggcatctacgatttgtggcaccgggggagcgcccttccggcatgttcgactcgtccgtcctctgtgagtgctatgacgcgggctgtgcttggtatgagctcacgcccgccgagactacagttagactacgagcgtaatgaacaccccggggcttcccgtgtgccaagaccatctcgaattttgggagggcgtcttcacaggcctcactcatatagatgcccacttcctatcccagacaaagcagagtggggagaatcttccttacctggtagcgtacaagccaccgtgtgcgctagggctcaagcccctcccccatcgtgggaccagatgtggaagtgtttgatccgcctcaaacccaccctccatgggccaacacctctgctatacagactgggcgctgtccaaatgaggtcaccttgacgcacccagtcactaaatacatcatga

SEQ ID NO: 45 - DNA, 4853 bp, Hepatitis C virus; identical to SEQ ID NO: 34

SEQ ID NO: 46 - DNA, 4853 bp, Hepatitis C virus; identical to SEQ ID NO: 23

SEQ ID NO: 47 - DNA, 4853 bp, Hepatitis C virus; identical to SEQ ID NO: 23

SEQ ID NO: 48 - DNA, 4853 bp, Hepatitis C virus; identical to SEQ ID NO: 34

SEQ ID NO: 49 - DNA, 4853 bp, Hepatitis C virus
tcgcccacaggacgttaagttcccgggtggcggtcagatcgttggtggagtttacttgttgccgcgcaggggccctagaatgggtgtgcgcgcgccgaggaagacttccgagcggtcgcaacctcgagtagacgtcagcctatccccaaggcacgtcggcccgagggcaggacctgggctcagcccgggtacccttggcccctctatggcaatgagggctgcgggtgggcgggatggctcctgtctccccgcggtctcggcctagttggggccccacagacccccggcgtaggtcgcgcaatttgggtaaggtcatcgatacccttacgtgcggcttcgccgacctcatggggtacataccgctcgtcggcgcccctcttggaggcgctgccaggccctggcgcatggcgtccgggtcctggaagacggcgtgaactatgcaacagggaaccttcctggttgctctttctctatcttccttctggccctgctctcttgtctgactgtgcccgcttcggcctacaagtgcgcaactccacggggctctatcacgtcaccaatgattgccctaactcgagtattgtgtacgaggcgcctgatgccatcctgcacactccggggtgtgtcccttgcgttcgcgagggtaatgcctcgaggtgttggtggcgatgacccccacggtggccaccagggacggcaaactccctgcgacgcagctccgacgtcacatcgatctgcttgtcgggagcgccaccctctgttcggccctctacgtgggggacctgtgcggtctgtctttcttgttggtcaactgtttaccttctctcccaggcgccactggacgacgcaagactgcaattgttctatctatcccggccatataacgggccaccgcatggcatgggatatgatgatgaactggtccccgacgcagcgttggtaatggctcagctgctccggatcccgcaagccatcttggacatgatcgctggtgctcactggggagtcctggcgggcatagcgtatttctccatggtggggaactgggcgaaggtcctgtagtgctgttgctattcgccggcgtcgatgcggaaaccgtcgtcaccggggggaccgccgcccgcaacgcgtacggactctctagtctcttcatgcggggccccaagcagaacatccagctgatcaacaccaacggcagtggcacatcaataggacggccttgaactgcaacgatagccttaacaccggctggctagcagggcttttctatcagcacaacttcaactcttcaggctgtcctgagaggctggccagctgccgacgcctgccgattttgcccagggctggggccctatcagccatgccaacggcagcggccccgaccaccgcccctactgctggcactaccccccaaaaccttgcggtattgtgcccgcacagaacgtgtgtggtccggtatattgcttcctcccagccccgtggcggtgggaacgaccgacaggtcgggcgtccctacctaccgctggggtgaaaatgagacggacgtcttcgtccttaacaacaccaggccaccgctgggcaattggtttggttgacctggatgaactcaactggattcaccaaagtgtgcggagcgcctccttgtgtcatcggaggggcgggcaacaacaccttgcactgccccaccgattgtttccgcaagcatccggaagccacatactcccggtgcggctccgtccctggattacacccagatgcatggtcgactacccgtataggctttggcattatccttgtaccatcaactataccatatttaaagtcaggatgtacgtgggaggggtcgagcataggctggatgtgcctgcaactggacgcggggcgaacgctgcgatctggaagacagggacaggtccgagctcagcccgttgctgctgtccaccacacagtggcaggtccttccgtgttccttcacgaccttgccggccttgtccaccggcctctccacctccaccagaacatcgtggacgtacagtacctgtacggggtggggtcaagcattgcgtcctgggccattaagtgggagtacgtcgttctcctgttccttctgcttgcagacgcgcgcgtctgtcctgcctgtggatgatgctactcatatcccaagcggaggcggctttggagaacctcgtaacactcaatgcagcatccctggccgggacgcaaggtcttgtatccttcctcgtgttcttctgtttcgcgtggtatctgaaggtaggtgggtgccaggagcggtttacgccctctacgggatgtggcctctcctcctgctcctgttggcgttgccccagcgggcatacgcgctggacacggaggtggccgcgtcgtgtggcggcgttgtctcgtcgggttgatggcgctgactctgtcaccgtattacaagcgctacatcagctggtgcttatggtggctccagtattttctgactagagcagaagcgcaactgcacgtatgggttccccccctcaacgctcgagggggggcgacgctgtcatcttactcatgtgtgttgtacacccgactttggtatttgacatcaccaaactactgctggccgtcctcggacccctttggattcttcaagccagtctgcttaaagtaccctacttgtgcgcgtccagggccttctccggatctgcgcgttagcgcggaagatggttgggggccactacgtgcaaatggttatcatcaagctagggacgcttactggcacctatgtttacaaccatctcactcctcttcgggactggcgcacaacggcctgcgagatctggccgtggctgtagagccagtcgtcttctcccaaatggagaccaagctcatcacatggggggcagacactgccgcgtgcggtgacatcatcaacggcttgcccgttccgcccgtaggggccgggagatactgctcggaccagccgatggaatggtctccaaggggtggaggttgctggcgcccatcacggcgtacgcccagcagacaaggggcctcttaggatgcataatcaccagcctgaccggcgggacaaaaaccaagtggagggtgaagtccagattgtgtcaactgctgcccaaactttcctcgcaacgtgcatcagtggggtatgctggactgtctaccacggggccggaacgaggactattgcatctccaaaggccctgttatccagatgtataccaatgtggacaaagaccttgtgggctggcccgcccctcaaggtgcccgctcattgacgccctgcacctgcggctcctcggacctttacctggtcacgaggcatgccgatgtctccccgtgcgccggcggggtgatagcaggggcagcctgctttcgccccggcccatttcctatttgaaaggttcctcggggggcccgctgttgtgccccgcgggacacgccgtaggcatattcagggcgcggtgtgcacccgtggagtggctaaggcggtggactttatccccgtggagaacctagagacaaccatgaggtccccggtgtttacggacaactcctctccgccagcagtgccccagagcttccaggtggcccacctgcatctcccacgggcagcggcaagagcaccaaggtcccagctgcatatgcggctcagggctataaagtgctagtgctcaacccctctgttgctgcaacactgggctttggtgcttatatgtccaaggcccagggattgatcctaacatcaggaccggggcgagaacaattaccactggcagccccatcacgtactccacctacggcaagttccttgccgacggcgggtgctcggggggcgcctatgatataataatttgtgacgagtgccacccacggatgccacatccatcttgggcatcggcactgtccttgaccaggcagagaccgcgggggcgagactagttgtgctcgccaccgccacccctccgggctccatcactgtgccccatcctaacatgaggaggttgctctgtccaccaccggagagattcctttctatggcaaggctatccccctcgaagtaatcaaaggggggagacatctcattttttgtcactcaaagaagaagtgcgatgagctcgccgcaaagctggtcgcatgggcatcaatgccgtggcctactaccgcggtcttgacgtgtccgtcatcccgaccagcggcgatgttgtcgtcgtggcaactgatgctctcatgaccggttttaccggcgacttcgactcggtgatgactgcaacacgtgtgtcacccagacggtcgatttcagccttgaccctaccttcaccattgagacaaccacgcttccccaagatgctgtctcccgcactcagcgtcggggcaggactggcagggggaagccaggcatctacggtttgtggcaccaggggagcgcccttccggcatgttcgactcgtccatcctctgtgagtgctatgacgcgggttgtgcttggtatgagctcacacccgccgagactacagttagactacgagcgtaatgaacaccccggggcttcccgtgtgccaagaccatctcgaattttgggagggggtcttcacaggcctcactcatatagatgcccacttcctatcccagacaaagcagagtggggagaatcttccttacctggtagcgtacaagccaccgtgtgcgctagggctcaagcccctcccccatcgtgggaccagatgtggaagtgtttgatccgcctcaaacccacccttcatgggccaacacctctgctatacagactgggtgctgtccaaatgaggtcaccctgacgcacccagtcaccaaatatatcatga

SEQ ID NO: 50 - DNA, 4853 bp, Hepatitis C virus
tcgcccacaggacgttacgttcccgggtggcggtcagatcgttggtggagtttacttgttgccgcgcaggggccctagaatgggtgtgcgcgcgccgaggaagacttccgagcggtcgcaacctcgagtagacgtcagcctatccccaaggcacgtcggcccgagggtaggacctgggctcagcccgggtacccttggcccctctatggcaatgagggctgcgggtgggcgggatggctcctgtctccccgcggtctcggcctagttggggccccacagacccccggcgtaggtcgcgcaatttgggtaaggtcatcgatacccttacgtgcggcttcgccgacctcatggggtacataccgctcgtcggcgcccctcttggaggcgctgccaggccctggcgcatggcgtccgggttctggaagacggcgtgaactatgcaacggggaaccttcccggttgctctttctctatcttccttctggccctgctctcttgtctgactgtgcccgcttcggcctacaagtgcgcaactccacggggctttaccacgtcaccaatgattgccccaactcgagtattgtgtacgaggcgcctgatgccatcctgcacactccggggtgtgtcccttgcgttcgcgagggtaacgcctcgaggtgttggtggcgatgacccccacggtggccaccagggacggcaaactccctgcaacgcagctccgacgtcacatcgatctgcttgtcgggagtgccaccctctgttcggccctctacgtgggggacctgtgcggtctgtctttcttgttggtcaactgtttaccttctctcccaggcgccactggacgacgcaagactgcaattgttctatctatcccggccatataacgggccaccgcatggcatgggatatgatgatgaactggtccccgacgcggcgttggtaatggctcagctgctccggatcccgcaagccatcttggatatgatcgctggtgcccactggggagtcctggcgggcatagcgtatttctccatggtggggaactgggcgaaggtcctgtagtgctgctgctatttgccggcgtcgatgcgggaaccgtcgtcaccggaggggtcgccgcccgcaccgcgtatggatttactagtctcttcacgcgaggcgcccagcagaacatccagctgatcaacaccaacggcagtggcacatcaataggacggccttgaactgcaacgacagccttaacaccggctggttagcagggcttttctatcggaacaacttcaactcttcaggctgtcctcagaggttggccagctgccggcgcctgccgattttgcccagggctggggccctatcagccatgccaacggcagcggccccgaccaccgcccctactgctggcactaccccccaaaaccttgcggcattgtgcccgcacaggacgtgtgtggcccggtatattgcttcctcccagccccgtggcggtgggaacgaccgacagggcgggcatccctacctacagctggggtgaaaatgatacggacgtcttcgtccttaacaacaccaggccaccgctgggcaattggtttggttgacctggatgaactcaactggattcaccaaagtgtgtggagcgcccccttgtgtcatcggaggggtgggcaacaacaccttgcactgccccactgattgtttccgcaagcatccggaagccacatactcccggtgcggctccgtccctggattacacccagatgcctggtcgactacccgtataggctttggcattatccttgtaccatcaactataccatattcaaagtcaggatgtatgtgggaggggtcgagcataggctggatgcgcctgcaactggacgcggggcgaacgttgcgatctggaagacagggacaggtccgagctcagcccgttgctgctgtccactacacagtggcaggtccttccgtgttccttcacgaccttgccagccttgtccaccggtctctccacctccaccagaacatcgtggacgtgcagtacctgtacggggtggggtcaagcatcgcgtcctgggccatcaagtgggagtacgtcgttctcctgttccttctgcttgcagacgcgcgcgtctgtcctgcctgtggatgatgctactcatatcccaagcggaggcggctttggagaacctcgtaatactcaatgcagcatccctggccgggacgcaaggtcttgtatccttcctcgtgttcttctgctttgcatggtatctgaaggtaggtgggtgccaggagcggtttacgccctctacggaatgtggcctctcctcctgctcctgctggcgttgccccagcgggcatacgcgctggacacggaggtggccgcgtcgtgtggcggcgttgtctcgtcgggttgatggcgctgactctgtcaccgtattacaagcgctacatcagctggtgcttatggtggctccagtattttctgactagagcagaagcgcaactgcacgtgtgggttccccccctcaacgttcgagggggggcgacgccgtcatcttactcatgtgtgttgtacacccgactttggtatttgacatcaccaaactactgctggccgtcctcggacccctttggatccttcaagccagtttgcttaaagtaccctacttgtgcgcgtccaaggccttctccggatctgcgcgttagcgcggaagatggtcgggggccaatacgtgcaaatggttatcatcaagttagggacgcttactggcacctatgtttacaaccatctcactcctcttcgggactggcgcacaacggcctgcgagatctggccgtggctgtagagccagtcgtcttctcccaaatggagaccaagctcatcacgtggggggcagacactgccgcgtgcggtgacatcatcaacggtctgcccgttccgcccgtaggggtcgggagatactgctcggaccagccgatggaatggtctccaaggggtggaggttgctggcgcccatcacggcgtacgcccagcagacaaggggcctcctagggtgcataatcaccagcctaaccggcgggacaaaaaccaagtggagggtgaggtccagattgtgtcaactgctgcccaaactttcctggcaacgtgcatcagtggggtatgctggactgtctaccacggggccggaacgaggactattgcatctccaaaggccccgttatccagatgtataccaatgtggacaaagaccttgtgggctggcccgctcctcaaggtgcccgctcattgacaccctgcacctgcggctcctcggacctttacctggtcacgaggcatgccgatgtctccccgtgcgccggcggggtgatagcaggggcagcctgctctcgccccggcccatttcctacttgaaaggctcctcggggggcccgctgttgtgccccgcgggacacgccgtaggcatattcagggcgcggtgtgcacccgtggagtggctaaggcggtggactttatccctgtggagaacctagagacaaccatgaggtccccggtgttcacggacaactcctctccgccagcagtgccccagagcttccaggtggcccacctgcatctcccacaggcagcggcaagagcaccaaggtcccggctgcatacgcggctcagggctataaggtgctagtgctcaacccttctgttgctgcaacattgggctttggtgcttacatgtccaaggcccagggatcgatcctaatatcaggaccggggcgagaacaattactactggcagccccatcacgtactccacctacggtaagttccttgccgacggcgggtgctcggggggcgcttatgatataataatttgtgacgagtgccacccacggatgccacatccatcttgggcatcggcactgtccttgaccaggcagagaccgcgggggcgagactggttgtgctcgccaccgccacccctccgggctccgtcactgtgccccaccccaacatgaggaggttgctctgtccaccaccggagagattcctttctatggcaaggctatccccctcgaagtaatcaaaggggggagacatctcattttttgtcactcaaagaagaagtgcgacgagctcgccgcaaagctggtcgcatgggcatcaatgccgtggcctactaccgcggtcttgatgtgtctgtcatcccgaccagcggcgatgttgtcgtcgtggcaactgatgctctcatgaccggctttaccggcgacttcgactcggtgatgactgcaacacgtgtgtcacccagacggtcgatttcagccttgaccctaccttcaccattgagacaaccacgcttccccaagacgctgtctcccgcactcaacgtcggggcaggactggcagggggaagccaggcatctacgatttgtggcaccgggggagcgcccttccggcatgttcgactcgtccgtcctctgtgagtgctatgacgcgggctgtgcttggtatgagctcacgcccgccgagactacagttagactacgagcgtaatgaacaccccggggcttcccgtgtgccaagaccatctcgaattttgggagggcgtcttcacaggcctcactcatatagatgcccacttcctatcccagacaaagcagagtggggagaatcttccttacctggtagcgtacaagccaccgtgtgcgctagggctcaagcccctcccccatcgtgggaccagatgtggaagtgtttgatccgcctcaaacccaccctccatgggccaacacctctgctatacagactgggcgctgtccaaatgaggtcaccttgacgcacccagtcactaaatacatcatga

SEQ ID NO: 51 - DNA, 4853 bp, Hepatitis C virus
tcgcccacaggacgttaagttcccgggtggcggtcagatcgttggtggagtttacttgttgccgcgcaggggccctagaatgggtgtgcgcgcgccgaggaagacttccgagcggtcgcaacctcgagtagacgtcagcctatccccaaggcacgtcggcccgagggtaggacctgggctcagcccgggtacccttggcccctctatggcaatgagggctgcgggtgggcgggatggctcctgtctccccgcggtctcggcctagttggggccccacagacccccggcgtaggtcgcgcaatttgggtaaggtcatcgatacccttacgtgcggcttcgccgacctcatggggtacataccgctcgtcggcgcccctcttggaggcgctgccaggccctggcgcatggcgtccgggttctggaagacggcgtgaactatgcaacggggaaccttcccggttgctctttctctatcttccttctggccctgctctcttgtctgactgtgcccgcttcggcctacaagtgcgcaactccacggggctttaccacgtcaccaatgattgccccaactcgagtattgtgtacgaggcgcctgatgccatcctgcacactccggggtgtgtcccttgcgttcgcgagggtaacgcctcgaggtgttggtggcgatgacccccacggtggccaccagggacggcaaactccctgcaacgcagctccgacgtcacatcgatctgcttgtcgggagtgccaccctctgttcggccctctacgtgggggacctgtgcggtctgtctttcttgttggtcaactgtttaccttctctcccaggcgccactggacgacgcaagactgcaattgttctatctatcccggccatataacgggccaccgcatggcatgggatatgatgatgaactggtccccgacgcggcgttggtaatggctcagctgctccggatcccgcaagccatcttggatatgatcgctggtgcccactggggagtcctggcgggcatagcgtatttctccatggtggggaactgggcgaaggtcctgtagtgctgctgctatttgccggcgtcgatgcgggaaccgtcgtcaccggaggggtcgccgcccgcaccgcgtatggatttactagtctcttcacgcgaggcgcccagcagaacatccagctgatcaacaccaacggcagtggcacatcaataggacggccttgaactgcaacgacagccttaacaccggctggttagcagggcttttctatcggaacaacttcaactcttcaggctgtcctcagaggttggccagctgccggcgcctgccgattttgcccagggctggggccctatcagccatgccaacggcagcggccccgaccaccgcccctactgctggcactaccccccaaaaccttgcggcattgtgcccgcacagaacgtgtgtggcccggtatattgcttcctcccagccccgtggcggtgggaacgaccgacagggcgggcatccctacctacagctggggtgaaaatgatacggacgtcttcgtccttaacaacaccaggccaccgctgggcaattggtttggttgacctggatgaactcaactggattcaccaaagtgtgtggagcgcccccttgtgtcatcggaggggtgggcaacaacaccttgcactgccccactgattgtttccgcaagcatccggaagccacatactcccggtgcggctccgtccctggattacacccagatgcctggtcgactacccgtataggctttggcattatccttgtaccatcaactataccatattcaaagtcaggatgtatgtgggaggggtcgagcataggctggatgcgcctgcaactggacgcggggcgaacgttgcgatctggaagacagggacaggtccgagctcagcccgttgctgctgtccactacacagtggcaggtccttccgtgttccttcacgaccttgccagccttgtccaccggtctctccacctccaccagaacatcgtggacgtgcagtacctgtacggggtggggtcaagcatcgcgtcctgggccatcaagtgggagtacgtcgttctcctgttccttctgcttgcagacgcgcgcgtctgtcctgcctgtggatgatgctactcatatcccaagcggaggcggctttggagaacctcgtaatactcaatgcagcatccctggccgggacgcaaggtcttgtatccttcctcgtgttcttctgctttgcatggtatctgaaggtaggtgggtgccaggagcggtttacgccctctacggaatgtggcctctcctcctgctcctgctggcgttgccccagcgggcatacgcgctggacacggaggtggccgcgtcgtgtggcggcgttgtctcgtcgggttgatggcgctgactctgtcaccgtattacaagcgctacatcagctggtgcttatggtggctccagtattttctgactagagcagaagcgcaactgcacgtgtgggttccccccctcaacgttcgagggggggcgacgccgtcatcttactcatgtgtgttgtacacccgactttggtatttgacatcaccaaactactgctggccgtcctcggacccctttggattcttcaagccagtttgcttaaagtaccctacttgtgcgcgtccaaggccttctccggatctgcgcgttagcgcggaagatggtcgggggccaatacgtgcaaatggttatcatcaagttagggacgcttactggcacctatgtttacaaccatctcactcctcttcgggactggcgcacaacggcctgcgagatctggccgtggctgtagagccagtcgtcttctcccaaatggagaccaagctcatcacgtggggggcagacactgccgcgtgcggtgacatcatcaacggtctgcccgttccgcccgtaggggtcgggagatactgctcggaccagccgatggaatggtctccaaggggtggaggttgctggcgcccatcacggcgtacgcccagcagacaaggggcctcctagggtgcataatcaccagcctaaccggcgggacaaaaaccaagtggagggtgaggtccagattgtgtcaactgctgcccaaactttcctggcaacgtgcatcagtggggtatgctggactgtctaccacggggccggaacgaggactattgcatctccaaaggccccgttatccagatgtataccaatgtggacaaagaccttgtgggctggcccgctcctcaaggtgcccgctcattgacaccctgcacctgcggctcctcggacctttacctggtcacgaggcatgccgatgtctccccgtgcgccggcggggtgatagcaggggcagcctgctctcgccccggcccatttcctacttgaaaggctcctcggggggcccgctgttgtgccccgcgggacacgccgtaggcatattcagggcgcggtgtgcacccgtggagtggctaaggcggtggactttatccctgtggagaacctagagacaaccatgaggtccccggtgttcacggacaactcctctccgccagcagtgccccagagcttccaggtggcccacctgcatctcccacaggcagcggcaagagcaccaaggtcccggctgcatacgcggctcagggctataaggtgctagtgctcaacccttctgttgctgcaacattgggctttggtgcttacatgtccaaggcccagggatcgatcctaatatcaggaccggggcgagaacaattactactggcagccccatcacgtactccacctacggtaagttccttgccgacggcgggtgctcggggggcgcttatgatataataatttgtgacgagtgccacccacggatgccacatccatcttgggcatcggcactgtccttgaccaggcagagaccgcgggggcgagactggttgtgctcgccaccgccacccctccgggctccgtcactgtgccccaccccaacatgaggaggttgctctgtccaccaccggagagattcctttctatggcaaggctatccccctcgaagtaatcaaaggggggagacatctcattttttgtcactcaaagaagaagtgcgacgagctcgccgcaaagctggtcgcatgggcatcaatgccgtggcctactaccgcggtcttgatgtgtctgccatcccgaccagcggcgatgttgtcgtcgtggcaactgatgctctcatgaccggctttaccggcgacttcgactcggtgatgactgcaacacgtgtgtcacccagacggtcgatttcagccttgaccctaccttcaccattgagacaaccacgcttccccaagacgctgtctcccgcactcaacgtcggggcaggactggcagggggaagccaggcatctacgatttgtggcaccgggggagcgcccttccggcatgttcgactcgtccgtcctctgtgagtgctatgacgcgggctgtgcttggtatgagctcacgcccgccgagactacagttagactacgagcgtaatgaacaccccggggcttcccgtgtgccaagaccatctcgaattttgggagggcgtcttcacaggcctcactcatatagatgcccacttcctatcccagacaaagcagagtggggagaatcttccttacctggtagcgtacaagccaccgtgtgcgctagggctcaagcccctcccccatcgtgggaccagatgtggaagtgtttgatccgcctcaaacccaccctccatgggccaacacctctgctatacagactgggcgctgtccaaatgaggtcaccttgacgcacccagtcactaaatacatcatga

SEQ ID NO: 52 - DNA, 4853 bp, Hepatitis C virus
tcgcccacaggacgttaagttcccgggtggcggtcagatcgttggtggagtttacttgttgccgcgcaggggccctagaatgggtgtgcgcgcgccgaggaagacttccgagcggtcgcaacctcgagtagacgtcagcctatccccaaggcacgtcggcccgagggcaggacctgggctcagcccgggtacccttggcccctctatggcaatgagggctgcgggtgggcgggatggctcctgtccccccgcggtctcggcctagttggggccccacagacccccggcgtaggtcgcgcaatttgggtaaggtcatcgacacccttacgtgcggcttcgccgacctcatggggtacataccgctcgtcggcgcccctcttggaggcgctgccaggccctggcgcatggcgttcgggttctggaagacggcgtgaactatgcaacagggaaccttcctggttgctctttctctatcttctttctggccctgctctcttgtctgactgtgcccgcttcggcctacaagtgcgcaactctacagggctctaccacgtcaccaatgattgccctaactcgagtattgtgtacgaggcgcctgatgccatcctgcacactccggggtgtgtcccttgcgttcgcgagggtaacgcctcgaggtgttggtggcgatgacccccacggtggccaccagggacggcaaactccccgcgacgcagcttcgacgtcacatcgatctgcttgtcgggagcgccaccctctgttcggctctttacgtgggggacctgtgcggtctgtctttcttgtgggtcaactgtttaccttctcccccaggcgccactggacgacgcaagactgcaattgctctatctatcccggccatataacgggtcaccgcatggcatgggatatgatgatgaactggtccccgacgcggcgttggtaatggctcagctgctccggatcccgcaagccatcttggacatgatcgctggtgcccactggggagtcttggcgggcatagcgtatttctccatggtggggaactgggcgaaggtcctgtagtgctgctgctattcgccggcgtcgacgcggaaaccatgaccaccgggggggccgccgctcgcaacgtgtatagaatttccagcttcttctcgccgggcccccagcagaacatccagctgatcaacaccaacggcagtggcacatcaataggacggccttgaactgcaacgacagccttaacaccggctggttagcagggcttttctatcatcgcagcttcaactcttcaggctgtcctgcgaggctggccagctgccgacgcctaccgactttgcccagggctggggccctatcagccatgccaacggcagcggccccgaccaacgcccctactgttggcactaccccccaaaaccttgcggtattgtgcccgcacggaacgtgtgtggcccggtatattgcttccccccagtcccgtggcggtgggaacgaccgacagggcgggcgtccctacctaccgctggggtgaaaatgaaacggacgtcttcgtccttaacaacaccaggccaccgctgggcaattggttcggttgacctggatgaattcaactggattcaccaaagtgtgcggagcgcctccttgtgtcatcggaggagtgggcaacgacaccttgtactgccccactgattgtttccgcaagcatccggaagccacatattcccggtgcggctccgtccctggattacacccagatgcctggttgactacccgtataggctttggcattatccttgtaccgtcaactacaccatattcaaagtcaggatgtatgtgggaggggtcgagcataggctggatgcgcctgcaactggacgcggggcgaacgttgcgatctggaagacagggacaggtccgagctcagcccgttgctgctgtccactacacagtggcaggtccttccgtgctccttcacgaccttgccagccttgtccaccggcctctccacctccaccagaacattgtggacgtgcagtacctgtacggggtagggtcaagcatcgcgtcctgggccattaagtgggagtacgtcgttctcctgttccttctgcttgcagacgcgcgcgtctgtcctgcctgtggatgatgctactcatatcccaagcggaggcggctttggagaacctcgtaatactcaatgcagcatccctggccgggacgcaaggtcttgtatccttcctcgtgttcttctgctttgcgtggtatctgaaggtaggtgggtgccaggagcggtttacgccctctacggaatgtggcctctcctcctgctcctgttggcgttgccccagcgggcatacgcgctggacacggaggtggccgcgtcgtgtggcggcgttgtcttgtcgggttgatgatgctgactctgtcaccgtattacaagcgctatatcagctggtgcttatggtggcttcagtattttctgactagggcagaagcgcaactgcacgtgtgggttccccccctcaacgttcgagggggggcgacgctgccatcttactcacatgcgttgtacacccgactctggtatttgacatcaccaaactactgctggctgtcctcggacccctttggattcttcaagccagtttgcttaaagtaccctacttgtgcgcgtccaaggccttctccggatctgcgcgttagcgcggaagatggtcggaggccactacgtgcaaatggttatcatcaagttagggatgcttactggcacctatgtttataaccatctcacccccctccgggactggcgcacaacggcctgcgagatctggccgtggctgtagaaccagtcgtcttctcccaaatggagaccaagctcatcacgtggggggcagacactgccgcgtgcggtgacatcatcaacggcttgcccgttccgcccgtaggggccaggagatactgctcggaccagccgatggaatggtctccaaggggtggaggttgctggcgcccatcacggcgtacgcccagcagacaaggggcctcctagggtgcataatcaccagcctaaccggcgggataaaaaccaagtggagggtgaggtccagattgtgtcaactgctgcccaaactttcctggcaacgtgcatcagtggggtatgctggactgtctaccacggggccggaacgaggactattgcatctccaaaggccctgttatccagatgtataccaatgtggacaaagaccttgtgggctggcccgctcctcaaggtgcccgctcattgacaccctgcacctgcggctcctcggacctttacctggtcacgaggcatgccgatgtctccccgtgcgccggcggggtgatagcaggggcagcctgctctcgccccggcccatttcctatctgaaaggctcctcggggggcccgctgttgtgccccgcgggacacgccgtaggcatattcagggcgcggtgtgcacccgtggagtggctaaggcggtggactttatccctgtggagaacctagagacaaccatgaggtccccggtgttcacggacaactcctctccgccagcagtgccccagagcttccaggtggcccacctgcatctcccacaggcagcggcaagagcaccaaggtcccggctgcgtatgcggctcagggctataaggtgctagtgctcaacccctctgtcgctgcaacactgggctttggtgcttatatgtccaaggcccagggatcgatcctaatatcaggaccggggcgagaacaattaccactggcagccccatcacgtactccacctacggcaaatttcttgccgacggcgggtgctcggggggcgcttatgatataataatttgtgacgagtgccatccacggatgccacatccatcttgggcatcggcactgtccttgaccaggcagagaccgcgggggcgagactggttgtgctcgccaccgccacccctccgggctccgtcactgtgccccatcctaacatgaggaggttgctctgtccaccaccggagagattcctttctatggcaaggctatccccctcgaagtaatcaaaggggggagacatctcattttttgtcactcaaagaagaagtgcgacgagctcgccgcaaagctagtcgcatgggcatcaatgccgtggcctactaccgcggtcttgacgtgtccgtcatcccgaccagcggcgatgttgtcgtcgtggcaactgatgctctcatgaccggctttaccggcgacttcgactcggtgatgactgcaacacgtgtgtcacccagacggtcgacttcagccttgaccctactttcaccattgagacaaccacgcttccccaggatgctgtctcccgcactcaacgtcggggtaggactggcagggggaagccaggcatctacgatttgtggcaccgggggagcgcccctccggcatgttcgactcgtccatcctctgtgagtgctatgacgcgggctgtgcttggtatgagctcacgcccgccgagactacagttagactacgagcgtaatgaacaccccggggcttcccgtgtgccaagaccatcttgaattttgggagggcgtcttcacaggcctcactcatatagatgcccacttcctatcccaaacaaagcagagtggggagaatcttccttacctggtagcgtacaagccaccgtgtgcgctagggctcaagcccctcccccatcgtgggaccagatgtggaagtgtttgatccgcctcaaacccaccctccatgggccaacacctctgctatacagactgggcgctgtccaaatgaggtcaccctgacgcacccagtcaccaaatacattatga

SEQ ID NO: 53 - DNA, 4853 bp, Hepatitis C virus; identical to SEQ ID NO: 23

SEQ ID NO: 54 - DNA, 4853 bp, Hepatitis C virus; identical to SEQ ID NO: 23

SEQ ID NO: 55 - DNA, 4853 bp, Hepatitis C virus; identical to SEQ ID NO: 34

SEQ ID NO: 56 - DNA, 4853 bp, Hepatitis C virus; identical to SEQ ID NO: 23

SEQ ID NO: 57 - DNA, 4853 bp, Hepatitis C virus
tcgcccacaggacgttaagttcccgggtggcggtcagatcgttggtggagtttacttgttgccgcgcaggggccctagaatgggtgtgcgcgcgccgaggaagacttccgagcggtcgcaacctcgagtagacgtcagcctatccccaaggcacgtcggcccgagggcaggacctgggctcagcccgggtacccttggcccctctatggcaatgagggctgcgggtgggcgggatggctcctgtccccccgcggtctcggcctagttggggccccacagacccccggcgtaggtcgcgcaatttgggtaaggtcatcgacacccttacgtgcggcttcgccgacctcatggggtacataccgctcgtcggcgcccctcttggaggcgctgccaggccctggcgcatggcgttcgggttctggaagacggcgtgaactatgcaacagggaaccttcctggttgctctttctctatcttctttctggccctgctctcttgtctgactgtgcccgcttcggcctacaagtgcgcaactctacagggctctaccacgtcaccaatgattgccctaactcgagtattgtgtacgaggcgcctgatgccatcctgcacactccggggtgtgtcccttgcgttcgcgagggtaacgcctcgaggtgttggtggcgatgacccccacggtggccaccagggacggcaaactccccgcgacgcagcttcgacgtcacatcgatctgcttgtcgggagcgccaccctctgttcggctctttacgtgggggacctgtgcggtctgtctttcttgtgggtcaactgtttaccttctcccccaggcgccactggacgacgcaagactgcaattgctctatctatcccggccatataacgggtcaccgcatggcatgggatatgatgatgaactggtccccgacgcggcgttggtaatggctcagctgctccggatcccgcaagccatcttggacatgatcgctggtgcccactggggagtcttggcgggcatagcgtatttctccatggtggggaactgggcgaaggtcctgtagtgctgctgctattcgccggcgtcgacgcggaaaccatgaccaccgggggggccgccgctcgcaacgtgtatagaatttccagcttcttctcgccgggcccccagcagaacatccagctgatcaacaccaacggcagtggcacatcaataggacggccttgaactgcaacgacagccttaacaccggctggttagcagggcttttctatcatcgcagcttcaactcttcaggctgtcctgcgaggctggccagctgccgacgcctaccgactttgcccagggctggggccctatcagccatgccaacggcagcggccccgaccaacgcccctactgttggcactaccccccaaaaccttgcggtattgtgcccgcacggaacgtgtgtggcccggtatattgcttccccccagtcccgtggcggtgggaacgaccgacagggcgggcgtccctacctaccgctggggtgaaaatgaaacggacgtcttcgtccttaacaacaccaggccaccgctgggcaattggttcggttgacctggatgaattcaactggattcaccaaagtgtgcggagcgcctccttgtgtcatcggaggagtgggcaacgacaccttgtactgccccactgattgtttccgcaagcatccggaagccacatattcccggtgcggctccgtccctggattacacccagatgcctggttgactacccgtataggctttggcattatccttgtaccgtcaactacaccatattcaaagtcaggatgtatgtgggaggggtcgagcataggctggatgcgcctgcaactggacgcggggcgaacgttgcgatctggaagacagggacaggtccgagctcagcccgttgctgctgtccactacacagtggcaggtccttccgtgctccttcacgaccttgccagccttgtccaccggcctctccacctccaccagaacattgtggacgtgcagtacctgtacggggtagggtcaagcatcgcgtcctgggccattaagtgggagtacgtcgttctcctgttccttctgcttgcagacgcgcgcgtctgtcctgcctgtggatgatgctactcatatcccaagcggaggcggctttggagaacctcgtaatattcaatgcagcatccctggccgggacgcaaggtcttgtatccttcctcgtgttcttctgctttgcgtggtatctgaaggtaggtgggtgccaggagcggtttacgccctctacggaatgtggcctctcctcctgctcctgttggcgttgccccagcgggcatacgcgctggacacggaggtggccgcgtcgtgtggcggcgttgtcttgtcgggttgatgatgctgactctgtcaccgtattacaagcgctatatcagctggtgcttatggtggcttcagtattttctgactagggcagaagcgcaactgcacgtgtgggttccccccctcaacgttcgagggggggcgacgctgccatcttactcacatgcgttgtacacccgactctggtatttgacatcaccaaactactgctggctgtcctcggacccctttggattcttcaagccagtttgcttaaagtaccctacttgtgcgcgtccaaggccttctccggatctgcgcgtcagcgcggaagatggtcggaggccactacgtgcaaatggttatcatcaagttagggatgcttactggcacctatgtttataaccatctcacccccctccgggactggcgcacaacggcctgcgagatctggccgtggctgtagaaccagtcgtcttctcccaaatggagaccaagctcatcacgtggggggcagacactgccgcgtgcggtgacatcatcaacggcttgcccgttccgcccgtaggggccaggagatactgctcggaccagccgatggaatggtctccaaggggtggaggttgctggcgcccatcacggcgtacgcccagcagacaaggggcctcctagggtgcataatcaccagcctaaccggcgggataaaaaccaagtggagggtgaggtccagattgtgtcaactgctgcccaaactttcctggcaacgtgcatcagtggggtatgctggactgtctaccacggggccggaacgaggactattgcatctccaaaggccctgttatccagatgtataccaatgtggacaaagaccttgtgggctggcccgctcctcaaggtgcccgctcattgacaccctgcacctgcggctcctcggacctttacctggtcacgaggcatgccgatgtcttcccgtgcgccggcggggtgatagcaggggcagcctgctctcgccccggcccatttcctatctgaaaggctcctcggggggcccgctgttgtgccccgcgggacacgccgtaggcatattcagggcgcggtgtgcacccgtggagtggctaaggcggtggactttatccctgtggagaacctagagacaaccatgaggtccccggtgttcacggacaactcctctccgccagcagtgccccagagcttccaggtggcccacctgcatctcccacaggcagcggcaagagcaccaaggtcccggctgcgtatgcggctcagggctataaggtgctagtactcaacccctctgtcgctgcaacactgggctttggtgcttatatgtccaaggcccagggatcgatcctaatatcaggaccggggcgagaacaattaccactggcagccccatcacgtactccacctacggcaaatttcttgccgacggcgggtgctcggggggcgcttatgatataataatttgtgacgagtgccatccacggatgccacatccatcttgggcatcggcactgtccttgaccaggcagagaccgcgggggcgagactggttgtgctcgccaccgccacccctccgggctccgtcactgtgccccatcctaacatgaggaggttgctctgtccaccaccggagagattcctttctatggcaaggctatccccctcgaagtaatcaaaggggggagacatctcattttttgtcactcaaagaagaagtgcgacgagctcgccgcaaagctagtcgcatgggcatcaatgccgtggcctactaccgcggtcttgacgtgtccgtcatcccgaccagcggcgatgttgtcgtcgtggcaactgatgctctcatgaccggctttaccggcgacttcgactcggtgatgactgcaacacgtgtgtcacccagacggtcgacttcagccttgaccctactttcaccattgagacaaccacgcttccccaggatgctgtctcccgcactcaacgtcggggtaggactggcagggggaagccaggcatctacgatttgtggcaccgggggagcgcccctccggcatgttcgactcgtccatcctctgtgagtgctatgacgcgggctgtgcttggtatgagctcacgcccgccgagactacagttagactacgagcgtaatgaacaccccggggcttcccgtgtgccaagaccatcttgaattttgggagggcgtcttcacaggcctcactcatatagatgcccacttcctatcccaaacaaagcagagtggggagaatcttccttacctggtagcgtacaagccaccgtgtgcgctagggctcaagcccctcccccatcgtgggaccagatgtggaagtgtttgatccgcctcaaacccaccctccatgggccaacacctctgctatacagactgggcgctgtccaaatgaggtcaccctgacgcacccagtcaccaaatacattatga

SEQ ID NO: 58 - DNA, 4853 bp, Hepatitis C virus; identical to SEQ ID NO: 49

SEQ ID NO: 59 - DNA, 4853 bp, Hepatitis C virus
tcgcccacaggacgttaagttcccgggtggcggtcagatcgttggtggagtttacttgttgccgcgcaggggccctagaatgggtgtgcgcgcgccgaggaagacttccgagcggtcgcaacctcgagtagacgtcagcctatccccaaggcacgtcggcccgagggcaggacctgggctcagcccgggtacccttggcccctctatggcaatgagggctgcgggtgggcgggatggctcctgtccccccgcggtctcggcctagttggggccccacagacccccggcgtaggtcgcgcaatttgggtaaggtcatcgacacccttacgtgcggcttcgccgacctcatggggtacataccgctcgtcggcgcccctcttggaggcgctgccaggccctggcgcatggcgttcgggttctggaagacggcgtgaactatgcaacagggaaccttcctggttgctctttctctatcttctttctggccctgctctcttgtctgactgtgcccgcttcggcctacaagtgcgcaactctacagggctctaccacgtcaccaatgattgccctaactcgagtattgtgtacgaggcgcctgatgccatcctgcacactccggggtgtgtcccttgcgttcgcgagggtaacgcctcgaggtgttggtggcgatgacccccacggtggccaccagggacggcaaactccccgcgacgcagcttcgacgtcacatcgatctgcttgtcgggagcgccaccctctgttcggctctttacgtgggggacctgtgcggtctgtctttcttgtgggtcaactgtttaccttctcccccaggcgccactggacgacgcaagactgcaattgctctatctatcccggccatataacgggtcaccgcatggcatgggatatgatgatgaactggtccccgacgcggcgttggtaatggctcagctgctccggatcccgcaagccatcttggacatgatcgctggtgcccactggggagtcttggcgggcatagcgtatttctccatggtggggaactgggcgaaggtcctgtagtgctgctgctattcgccggcgtcgacgcggaaaccatgaccaccgggggggccgccgctcgcaacgtgtatagaatttccagcttcttctcgccgggcccccagcagaacatccagctgatcaacaccaacggcagtggcacatcaataggacggccttgaactgcaacgacagccttaacaccggctggttagcagggcttttctatcatcgcagcttcaactcttcaggctgtcctgcgaggctggccagctgccgacgcctaccgactttgcccagggctggggccctatcagccatgccaacggcagcggccccgaccaacgcccctactgttggcactaccccccaaaaccttgcggtattgtgcccgcacggaacgtgtgtggcccggtatattgcttccccccagtcccgtggcggtgggaacgaccgacagggcgggcgtccctacctaccgctggggtgaaaatgaaacggacgtcttcgtccttaacaacaccaggccaccgctgggcaattggttcggttgacctggatgaattcaactggattcaccaaagtgtgcggagcgcctccttgtgtcatcggaggagtgggcaacgacaccttgtactgccccactgattgtttccgcaagcatccggaagccacatattcccggtgcggctccgtccctggattacacccagatgcctggttgactacccgtataggctttggcattatccttgtaccgtcaactacaccatattcaaagtcaggatgtatgtgggaggggtcgagcataggctggatgcgcctgcaactggacgcggggcgaacgttgcgatctggaagacagggacaggtccgagctcagcccgttgctgctgtccactacacagtggcaggtccttccgtgctccttcacgaccttgccagccttgtccaccggcctctccacctccaccagaacattgtggacgtgcagtacctgtacggggtagggtcaagcatcgcgtcctgggccattaagtgggagtacgtcgttctcctgttccttctgcttgcagacgcgcgcgtctgtcctgcctgtggatgatgctactcatatcccaagcggaggcggctttggagaacctcgtaatactcaatgcagcatccctggccgggacgcaaggtcttgtatccttcctcgtgttcttctgctttgcgtggtatctgaaggtaggtgggtgccaggagcggtttacgccctctacggaatgtggcctctcctcctgctcctgttggcgttgccccagcgggcatacgcgctggacacggaggtggccgcgtcgtgtggcggcgttgtcttgtcgggttgatgatgctgactctgtcaccgtattacaagcgctatatcagctggtgcttatggtggcttcagtattttctgactagggcagaagcgcaactgcacgtgtgggttccccccctcaacgttcgagggggggcgacgctgccatcttactcacatgcgttgtacacccgactctggtatttgacatcaccaaactactgctggctgtcctcggacccctttggattcttcaagccagtttgcttaaagtaccctacttgtgcgcgtccaaggccttctccggatctgcgcgttagcgcggaagatggtcggaggccactacgtgcaaatggttatcatcaagttagggatgcttactggcacctatgtttataaccatctcacccccctccgggactggcgcacaacggcctgcgagatctggccgtggctgtagaaccagtcgtcttctcccaaatggagaccaagctcatcacgtggggggcagacactgccgcgtgcggtgacatcatcaacggcttgcccgttccgcccgtaggggccaggagatactgctcggaccagccgatggaatggtctccaaggggtggaggttgctggcgcccatcacggcgtacgcccagcagacaaggggcctcctagggtgcataatcaccagcctaaccggcgggataaaaaccaagtggagggtgaggtccagattgtgtcaactgctgcccaaactttcctggcaacgtgcatcagtggggtatgctggactgtctaccacggggccggaacgaggactattgcatctccaaaggccctgttatccagatgtataccaatgtggacaaagaccttgtgggctggcccgctcctcaaggtgcccgctcattgacaccctgcacctgcggctcctcggacctttacctggtcacgaggcatgccgatgtctccccgtgcgccggcggggtgatagcaggggcagcctgctctcgccccggcccatttcctatctgaaaggctcctcggggggcccgctgttgtgccccgcgggacacgccgtaggcatattcagggcgcggtgtgcacccgtggagtggctaaggcggtggactttatccctgtggagaacctagagacaaccatgaggtccccggtgttcacggacaactcctctccgccagcagtgccccagagcttccaggtggcccacctgcatctcccacaggcagcggcaagagcaccaaggtcccggctgcgtatgcggctcagggctataaggtgctagtactcaacccctctgtcgctgcaacactgggctttggtgcttatatgtccaaggcccagggatcgatcctaatatcaggaccggggcgagaacaattaccactggcagccccatcacgtactccacctacggcaaatttcttgccgacggcgggtgctcggggggcgcttatgatataataatttgtgacgagtgccatccacggatgccacatccatcttgggcatcggcactgtccttgaccaggcagagaccgcgggggcgagactggttgtgctcgccaccgccacccctccgggctccgtcactgtgccccatcctaacatgaggaggttgctctgtccaccaccggagagattcctttctatggcaaggctatccccctcgaagtaatcaaaggggggagacatctcattttttgtcactcaaagaagaagtgcgacgagctcgccgcaaagctagtcgcatgggcatcaatgccgtggcctactaccgcggtcttgacgtgtccgtcatcccgaccagcggcgatgttgtcgtcgtggcaactgatgctctcatgaccggctttaccggcgacttcgactcggtgatgactgcaacacgtgtgtcacccagacggtcgacttcagccttgaccctactttcaccattgagacaaccacgcttccccaggatgctgtctcccgcactcaacgtcggggtaggactggcagggggaagccaggcatctacgatttgtggcaccgggggagcgcccctccggcatgttcgactcgtccatcctctgtgagtgctatgacgcgggctgtgcttggtatgagctcacgcccgccgagactacagttagactacgagcgtaatgaacaccccggggcttcccgtgtgccaagaccatcttgaattttgggagggcgtcttcacaggcctcactcatatagatgcccacttcctatcccaaacaaagcagagtggggagaatcttccttacctggtagcgtacaagccaccgtgtgcgctagggctcaagcccttcccccatcgtgggaccagatgtggaagtgtttgatccgcctcaaacccaccctccatgggccaacacctctgctatacagactgggcgctgtccaaatgaggtcaccctgacgcacccagtcaccaaatacattatga

SEQ ID NO: 60 - DNA, 4853 bp, Hepatitis C virus; identical to SEQ ID NO: 41

SEQ ID NO: 61 - DNA, 4853 bp, Hepatitis C virus
tcgcccacaggacgttaagttcccgggtggcggtcagatcgttggtggagtttacttgttgccgcgcaggggccctagaatgggtgtgcgcgcgccgaggaagacttccgagcggtcgcaacctcgagtagacgtcagcctatccccaaggcacgtcggcccgagggcaggacctgggctcagcccgggtacccttggcccctctatggcaatgagggctgcgggtgggcgggatggctcctgtccccccgcggtctcggcctagttggggccccacagacccccggcgtaggtcgcgcaatttgggtaaggtcatcgacacccttacgtgcggcttcgccgacctcatggggtacataccgctcgtcggcgcccctcttggaggcgctgccaggccctggcgcatggcgttcgggttctggaagacggcgtgaactatgcaacagggaaccttcctggttgctctttctctatcttctttctggccctgctctcttgtctgactgtgcccgcttcggcctacaagtgcgcaactctacagggctctaccacgtcaccaatgattgccctaactcgagtattgtgtacgaggcgcctgatgccatcctgcacactccggggtgtgtcccttgcgttcgcgagggtaacgcctcgaggtgttggtggcgatgacccccacggtggccaccagggacggcaaactccccgcgacgcagcttcgacgtcacatcgatctgcttgtcgggagcgccaccctctgttcggctctttacgtgggggacctgtgcggtctgtctttcttgtgggtcaactgtttaccttctcccccaggcgccactggacgacgcaagactgcaattgctctatctatcccggccatataacgggtcaccgcatggcatgggatatgatgatgaactggtccccgacgcggcgttggtaatggctcagctgctccggatcccgcaagccatcttggacatgatcgctggtgcccactggggagtcttggcgggcatagcgtatttctccatggtggggaactgggcgaaggtcctgtagtgctgctgctattcgccggcgtcgacgcggaaaccatgaccaccgggggggccgccgctcgcaacgtgtatagaatttccagcttcttctcgccgggcccccagcagaacatccagctgatcaacaccaacggcagtggcacatcaataggacggccttgaactgcaacgacagccttaacaccggctggttagcagggcttttctatcatcgcagcttcaactcttcaggctgtcctgcgaggctggccagctgccgacgcctaccgactttgcccagggctggggccctatcagccatgccaacggcagcggccccgaccaacgcccctactgttggcactaccccccaaaaccttgcggtattgtgcccgcacggaacgtgtgtggcccggtatattgcttccccccagtcccgtggcggtgggaacgaccgacagggcgggcgtccctacctaccgctggggtgaaaatgaaacggacgtcttcgtccttaacaacaccaggccaccgctgggcaattggttcggttgacctggatgaattcaactggattcaccaaagtgtgcggagcgcctccttgtgtcatcggaggagtgggcaacgacaccttgtactgccccactgattgtttccgcaagcatccggaagccacatattcccggtgcggctccgtccctggattacacccagatgcctggttgactacccgtataggctttggcattatccttgtaccgtcaactacaccatattcaaagtcaggatgtatgtgggaggggtcgagcataggctggatgcgcctgcaactggacgcggggcgaacgttgcgatctggaagacagggacaggtccgagctcagcccgttgctgctgtccactacacagtggcaggtccttccgtgctccttcacgaccttgccagccttgtccaccggcctctccacctccaccagaacattgtggacgtgcagtacctgtacggggtagggtcaagcatcgcgtcctgggccattaagtgggagtacgtcgttctcctgttccttctgcttgcagacgcgcgcgtctgtcctgcctgtggatgatgctactcatatcccaagcggaggcggctttggagaacctcgtaatactcaatgcagcatccctggccgggacgcaaggtcttgtatccttcctcgtgttcttctgctttgcgtggtatctgaaggtaggtgggtgccaggagcggtttacgccctctacggaatgtggcctctcctcctgctcctgttggcgttgccccagcgggcatacgcgctggacacggaggtggccgcgtcgtgtggcggcgttgtcttgtcgggttgatgatgctgactctgtcaccgtattacaagcgctatatcagctggtgcttatggtggcttcagtattttctgactagggcagaagcgcaactgcacgtgtgggttccccccctcaacgttcgagggggggcgacgctgccatcttactcacatgcgttgtacacccgactctggtatttgacatcaccaaactactgctggctatcctcggacccctttggattcttcaagccagtttgcttaaagtaccctacttgtgcgcgtccaaggccttctccggatctgcgcgttagcgcggaagatggtcggaggccactacgtgcaaatggttatcatcaagttagggatgcttactggcacctatgtttataaccatctcacccccctccgggactggcgcacaacggcctgcgagatctggccgtggctgtagaaccagtcgtcttctcccaaatggagaccaagctcatcacgtggggggcagacactgccgcgtgcggtgacatcatcaacggcttgcccgttccgcccgtaggggccaggagatactgctcggaccagccgatggaatggtctccaaggggtggaggttgctggcgcccatcacggcgtacgcccagcagacaaggggcctcctagggtgcataatcaccagcctaaccggcgggataaaaaccaagtggagggtgaggtccagattgtgtcaactgctgcccaaactttcctggcaacgtgcatcagtggggtatgctggactgtctaccacggggccggaacgaggactattgcatctccaaaggccctgttatccagatgtataccaatgtggacaaagaccttgtgggctggcccgctcctcaaggtgcccgctcattgacaccctgcacctgcggctcctcggacctttacctggtcacgaggcatgccgatgtctccccgtgcgccggcggggtgatagcaggggcagcctgctctcgccccggcccatttcctatctgaaaggctcctcggggggcccgctgttgtgccccgcgggacacgccgtaggcatattcagggcgcggtgtgcacccgtggagtggctaaggcggtggactttatccctgtggagaacctagagacaaccatgaggtccccggtgttcacggacaactcctctccgccagcagtgccccagagcttccaggtggcccacctgcatctcccacaggcagcggcaagagcaccaaggtcccggctgcgtatgcggctcagggctataaggtgctagtactcaacccctctgtcgctgcaacactgggctttggtgcttatatgtccaaggcccagggatcgatcctaatatcaggaccggggcgagaacaattaccactggcagccccatcacgtactccacctacggcaaatttcttgccgacggcgggtgctcggggggcgcttatgatataataatttgtgacgagtgccatccacggatgccacatccatcttgggcatcggcactgtccttgaccaggcagagaccgcgggggcgagactggttgtgctcgccaccgccacccctccgggctccgtcactgtgccccatcctaacatgaggaggttgctctgtccaccaccggagagattcctttctatggcaaggctatccccctcgaagtaatcaaaggggggagacatctcattttttgtcactcaaagaagaagtgcgacgagctcgccgcaaagctagtcgcatgggcatcaatgccgtggcctactaccgcggtcttgacgtgtccgtcatcccgaccagcggcgatgttgtcgtcgtggcaactgatgctctcatgaccggctttaccggcgacttcgactcggtgatgactgcaacacgtgtgtcacccagacggtcgacttcagccttgaccctactttcaccattgagacaaccacgcttccccaggatgctgtctcccgcactcaacgtcggggtaggactggcagggggaagccaggcatctacgatttgtggcaccgggggagcgcccctccggcatgttcgactcgtccatcctctgtgagtgctatgacgcgggctgtgcttggtatgagctcacgcccgccgagactacagttagactacgagcgtaatgaacaccccggggcttcccgtgtgccaagaccatcttgaattttgggagggcgtcttcacaggcctcactcatatagatgcccacttcctatcccaaacaaagcagagtggggagaatcttccttacctggtagcgtacaagccaccgtgtgcgctagggctcaagcccctcccccatcgtgggaccagatgtggaagtgtttgatccgcctcaaacccaccctccatgggccaacacctctgctatacagactgggcgctgtccaaatgaggtcaccctgacgcacccagtcaccaaatacattatga

SEQ ID NO: 62 - DNA, 4853 bp, Hepatitis C virus; identical to SEQ ID NO: 34

SEQ ID NO: 63 - DNA, 4853 bp, Hepatitis C virus; identical to SEQ ID NO: 23

SEQ ID NO: 64 - DNA, 4853 bp, Hepatitis C virus
tcgcccacaggacgttaagttcccgggtggcggtcagatcgttggtggagtttacttgttgccgcgcaggggccctagaatgggtgtgcgcgcgccgaggaagacttccgagcggtcgcaacctcgagtagacgtcagcctatccccaaggcacgtcggcccgagggtaggacctgggctcagcccgggtacccttggcccctctatggcaatgagggctgcgggtgggcgggatggctcctgtctccccgcggtctcggcctagttggggccccacagacccccggcgtaggtcgcgcaatttgggtaaggtcatcgatacccttacgtgcggcttcgccgacctcatggggtacataccgctcgtcggcgcccctcttggaggcgctgccaggccctggcgcatggcgtccgggttctggaagacggcgtgaactatgcaacggggaaccttcccggttgctctttctctatcttccttctggccctgctctcttgtctgactgtgcccgcttcggcctacaagtgcgcaactccacggggctttaccacgtcaccaatgattgccccaactcgagtattgtgtacgaggcgcctgatgccatcctgcacactccggggtgtgtcccttgcgttcgcgagggtaacgcctcgaggtgttggtggcgatgacccccacggtggccaccagggacggcaaactccctgcaacgcagctccgacgtcacatcgatctgcttgtcgggagtgccaccctctgttcggccctctacgtgggggacctgtgcggtctgtctttcttgttggtcaactgtttaccttctctcccaggcgccactggacgacgcaagactgcaattgttctatctatcccggccatataacgggccaccgcatggcatgggatatgatgatgaactggtccccgacgcggcgttggtaatggctcagctgctccggatcccgcaagccatcttggatatgatcgctggtgcccactggggagtcctggcgggcatagcgtatttctccatggtggggaactgggcgaaggtcctgtagtgctgctgctatttgccggcgtcgatgcgggaaccgtcgtcaccggaggggtcgccgcccgcaccgcgtatggatttactagtctcttcacgcgaggcgcccagcagaacatccagctgatcaacaccaacggcagtggcacatcaataggacggccttgaactgcaacgacagccttaacaccggctggttagcagggcttttctatcggaacaacttcaactcttcaggctgtcctcagaggttggccagctgccggcgcctgccgattttgcccagggctggggccctatcagccatgccaacggcagcggccccgaccaccgcccctactgctggcactaccccccaaaaccttgcggcattgtgcccgcacagaacgtgtgtggcccggtatattgcttcctcccagccccgtggcggtgggaacgaccgacagggcgggcatccctacctacagctggggtgaaaatgatacggacgtcttcgtccttaacaacaccaggccaccgctgggcaattggtttggttgacctggatgaactcaactggattcaccaaagtgtgtggagcgcccccttgtgtcatcggaggggtgggcaacaacaccttgcactgccccactgattgtttccgcaagcatccggaagccacatactcccggtgcggctccgtccctggattacacccagatgcctggtcgactacccgtataggctttggcattatccttgtaccatcaactataccatattcaaagtcaggatgtatgtgggaggggtcgagcataggctggatgcgcctgcaactggacgcggggcgaacgttgcgatctggaagacagggacaggtccgagctcagcccgttgctgctgtccactacacagtggcaggtccttccgtgttccttcacgaccttgccagccttgtccaccggtctctccacctccaccagaacatcgtggacgtgcagtacctgtacggggtggggtcaagcatcgcgtcctgggccatcaagtgggagtacgtcgttctcctgttccttctgcttgcagacgcgcgcgtctgtcctgcctgtggatgatgctactcatatcccaagcggaggtggctttggagaacctcgtaatactcaatgcagcatccctggccgggacgcaaggtcttgtatccttcctcgtgttcttctgctttgcatggtatctgaaggtaggtgggtgccaggagcggtttacgccctctacggaatgtggcctctcctcctgctcctgctggcgttgccccagcgggcatacgcgctggacacggaggtggccgcgtcgtgtggcggcgttgtctcgtcgggttgatggcgctgactctgtcaccgtattacaagcgctacatcagctggtgcttatggtggctccagtattttctgactagagcagaagcgcaactgcacgtgtgggttccccccctcaacgttcgagggggggcgacgccgtcatcttactcatgtgtgttgtacacccgactttggtatttgacatcaccaaactactgctggccgtcctcggacccctttggattcttcaagccagtttgcttaaagtaccctacttgtgcgcgtccaaggccttctccggatctgcgcgttagcgcggaagatggtcgggggccaatacgtgcaaatggttatcatcaagttagggacgcttactggcacctatgtttacaaccatctcactcctcttcgggactggcgcacaacggcctgcgagatctggccgtggctgtagagccagtcgtcttctcccaaatggagaccaagctcatcacgtggggggcagacactgccgcgtgcggtgacatcatcaacggtctgcccgttccgcccgtaggggtcgggagatactgctcggaccagccgatggaatggtctccaaggggtggaggttgctggcgcccatcacggcgtacgcccagcagacaaggggcctcctagggtgcataatcaccagcctaaccggcgggacaaaaaccaagtggagggtgaggtccagattgtgtcaactgctgcccaaactttcctggcaacgtgcatcagtggggtatgctggactgtctaccacggggccggaacgaggactattgcatctccaaaggccccgttatccagatgtataccaatgtggacaaagaccttgtgggctggcccgctcctcaaggtgcccgctcattgacaccctgcacctgcggctcctcggacctttacctggtcacgaggcatgccgatgtctccccgtgcgccggcggggtgatagcaggggcagcctgctctcgccccggcccatttcctacttgaaaggctcctcggggggcccgctgttgtgccccgcgggacacgccgtaggcatattcagggcgcggtgtgcacccgtggagtggctaaggcggtggactttatccctgtggagaacctagagacaaccatgaggtccccggtgttcacggacaactcctctccgccagcagtgccccagagcttccaggtggcccacctgcatctcccacaggcagcggcaagagcaccaaggtcccggctgcatacgcggctcagggctataaggtgctagtgctcaacccttctgttgctgcaacattgggctttggtgcttacatgtccaaggcccagggatcgatcctaatatcaggaccggggcgagaacaattactactggcagccccatcacgtactccacctacggtaagttccttgccgacggcgggtgctcggggggcgcttatgatataataatttgtgacgagtgccacccacggatgccacatccatcttgggcatcggcactgtccttgaccaggcagagaccgcgggggcgagactggttgtgctcgccaccgccacccctccgggctccgtcactgtgccccaccccaacatgaggaggttgctctgtccaccaccggagagattcctttctatggcaaggctatccccctcgaagtaatcaaaggggggagacatctcattttttgtcactcaaagaagaagtgcgacgagctcgccgcaaagctggtcgcatgggcatcaatgccgtggcctactaccgcggtcttgatgtgtctgtcatcccgaccagcggcgatgttgtcgtcgtggcaactgatgctctcatgaccggctttaccggcgacttcgactcggtgatgactgcaacacgtgtgtcacccagacggtcgatttcagccttgaccctaccttcaccattgagacaaccacgcttccccaagacgctgtctcccgcactcaacgtcggggcaggactggcagggggaagccaggcatctacgatttgtggcaccgggggagcgcccttccggcatgttcgactcgtccgtcctctgtgagtgctatgacgcgggctgtgcttggtatgagctcacgcccgccgagactacagttagactacgagcgtaatgaacaccccggggcttcccgtgtgccaagaccatctcgaattttgggagggcgtcttcacaggcctcactcatatagatgcccacttcctatcccagacaaagcagagtggggagaatcttccttacctggtagcgtacaagccaccgtgtgcgctagggctcaagcccctcccccatcgtgggaccagatgtggaagtgtttgatccgcctcaaacccaccctccatgggccaacacctctgctatacagactgggcgctgtccaaatgaggtcaccttgacgcacccagtcactaaatacatcatga

SEQ ID NO: 65 - DNA, 4853 bp, Hepatitis C virus
tcgcccacaggacgttaagttcccgggtggcggtcagatcgttggtggagtttacttgttgccgcgcaggggccctagaatgggtgtgcgcgcgccgaggaagacttccgagcggtcgcaacctcgagtagacgtcagcctatccccaaggcacgtcggcccgagggtaggacctgggctcagcccgggtacccttggcccctctatggcaatgagggctgcgggtgggcgggatggctcctgtctccccgcggtctcggcctagttggggccccacagacccccggcgtaggtcgcgcaatttgggtaaggtcatcgatacccttacgtgcggcttcgccgacctcatggggtacataccgctcgtcggcgcccctcttggaggcgctgccaggccctggcgcatggcgtccgggttctggaagacggcgtgaactatgcaacggggaaccttcccggttgctctttctctatcttccttctggccctgctctcttgtctgactgtgcccgcttcggcctacaagtgcgcaactccacggggctttaccacgtcaccaatgattgccccaactcgagtattgtgtacgaggcgcctgatgccatcctgcacactccggggtgtgtcccttgcgttcgcgagggtaacgcctcgaggtgttggtggcgatgacccccacggtggccaccagggacggcaaactccctgcaacgcagctccgacgtcacatcgatctgcttgtcgggagtgccaccctctgttcggccctctacgtgggggacctgtgcggtctgtctttcttgttggtcaactgtttaccttctctcccaggcgccactggacgacgcaagactgcaattgttctatctatcccggccatataacgggccaccgcatggcatgggatatgatgatgaactggtccccgacgcggcgttggtgatggctcagctgctccggatcccgcaagccatcttggatatgatcgctggtgcccactggggagtcctggcgggcatagcgtatttctccatggtggggaactgggcgaaggtcctgtagtgctgctgctatttgccggcgtcgatgcgggaaccgtcgtcaccggaggggtcgccgcccgcaccgcgtatggatttactagtctcttcacgcgaggcgcccagcagaacatccagctgatcaacaccaacggcagtggcacatcaataggacggccttgaactgcaacgacagccttaacaccggctggttagcagggcttttctatcggaacaacttcaactcttcaggctgtcctcagaggttggccagctgccggcgcctgccgattttgcccagggctggggccctatcagccatgccaacggcagcggccccgaccaccgcccctactgctggcactaccccccaaaaccttgcggcattgtgcccgcacagaacgtgtgtggcccggtatattgcttcctcccagccccgtggcggtgggaacgaccgacagggcgggcatccctacctacagctggggtgaaaatgatacggacgtcttcgtccttaacaacaccaggccaccgctgggcaattggtttggttgacctggatgaactcaactggattcaccaaagtgtgtggagcgcccccttgtgtcatcggaggggtgggcaacaacaccttgcactgccccactgattgtttccgcaagcatccggaagccacatactcccggtgcggctccgtccctggattacacccagatgcctggtcgactacccgtataggctttggcattatccttgtaccatcaactataccatattcaaagtcaggatgtatgtgggaggggtcgagcataggctggatgcgcctgcaactggacgcggggcgaacgttgcgatctggaagacagggacaggtccgagctcagcccgttgctgctgtccactacacagtggcaggtccttccgtgttccttcacgaccttgccagccttgtccaccggtctctccacctccaccagaacatcgtggacgtgcagtacctgtacggggtggggtcaagcatcgcgtcctgggccatcaagtgggagtacgtcgttctcctgttccttctgcttgcagacgcgcgcgtctgtcctgcctgtggatgatgctactcatatcccaagcggaggcggctttggagaacctcgtaatactcaatgcagcatccctggccgggacgcaaggtcttgtatccttcctcgtgttcttctgctttgcatggtatctgaaggtaggtgggtgccaggagcggtttacgccctctacggaatgtggcctctcctcctgctcctgctggcgttgccccagcgggcatacgcgctggacacggaggtggccgcgtcgtgtggcggcgttgtctcgtcgggttgatggcgctgactctgtcaccgtattacaagcgctacatcagctggtgcttatggtggctccagtattttctgactagagcagaagcgcaactgcacgtgtgggttccccccctcaacgttcgagggggggcgacgccgtcatcttactcatgtgtgttgtacacccgactttggtatttgacatcaccaaactactgctggccgtcctcggacccctttggattcttcaagccagtttgcttaaagtaccctacttgtgcgcgtccaaggccttctccggatctgcgcgttagcgcggaagatggtcgggggccaatacgtgcaaatggttatcatcaagttagggacgcttactggcacctatgtttacaaccatctcactcctcttcgggactggcgcacaacggcctgcgagatctggccgtggctgtagagccagtcgtcttctcccaaatggagaccaagctcatcacgtggggggcagacactgccgcgtgcggtgacatcatcaacggtctgcccgttccgcccgtaggggtcgggagatactgctcggaccagccgatggaatggtctccaaggggtggaggttgctggcgcccatcacggcgtacgcccagcagacaaggggcctcctagggtgcataatcgccagcctaaccggcgggacaaaaaccaagtggagggtgaggtccagattgtgtcaactgctgcccaaactttcctggcaacgtgcatcagtggggtatgctggactgtctaccacggggccggaacgaggactattgcatctccaaaggccccgttatccagatgtataccaatgtggacaaagaccttgtgggctggcccgctcctcaaggtgcccgctcattgacaccctgcacctgcggctcctcggacctttacctggtcacgaggcatgccgatgtctccccgtgcgccggcggggtgatagcaggggcagcctgctctcgccccggcccatttcctacttgaaaggctcctcggggggcccgctgttgtgccccgcgggacacgccgtaggcatattcagggcgcggtgtgcacccgtggagtggctaaggcggtggactttatccctgtggagaacctagagacaaccatgaggtccccggtgttcacggacaactcctctccgccagcagtgccccagagcttccaggtggcccacctgcatctcccacaggcagcggcaagagcaccaaggtcccggctgcatacgcggctcagggctataaggtgctagtgctcaacccttctgttgctgcaacattgggctttggtgcttacatgtccaaggcccagggatcgatcctaatatcaggaccggggcgagaacaattactactggcagccccatcacgtactccacctacggtaagttccttgccgacggcgggtgctcggggggcgcttatgatataataatttgtgacgagtgccacccacggatgccacatccatcttgggcatcggcactgtccttgaccaggcagagaccgcgggggcgagactggttgtgctcgccaccgccacccctccgggctccgtcactgtgccccaccccaacatgaggaggttgctctgtccaccaccggagagattcctttctatggcaaggctatccccctcgaagtaatcaaaggggggagacatctcattttttgtcactcaaagaagaagtgcgacgagctcgccgcaaagctggtcgcatgggcatcaatgccgtggcctactaccgcggtcttgatgtgtctgtcatcccgaccagcggcgatgttgtcgtcgtggcaactgatgctctcatgaccggctttaccggcgacttcgactcggtgatgactgcaacacgtgtgtcacccagacggtcgatttcagccttgaccctaccttcaccattgagacaaccacgcttccccaagacgctgtctcccgcactcaacgtcggggcaggactggcagggggaagccaggcatctacgatttgtggcaccgggggagcgcccttccggcatgttcgactcgtccgtcctctgtgagtgctatgacgcgggctgtgcttggtatgagctcacgcccgccgagactacagttagactacgagcgtaatgaacaccccggggcttcccgtgtgccaagaccatctcgaattttgggagggcgtcttcacaggcctcactcatatagatgcccacttcctatcccagacaaagcagagtggggagaatcttccttacctggtagcgtacaagccaccgtgtgcgctagggctcaagcccctcccccatcgtgggaccagatgtggaagtgtttgatccgcctcaaacccaccctccatgggccaacacctctgctatacagactgggcgctgtccaaatgagatcaccttgacgcacccagtcactaaatacatcatga

SEQ ID NO: 66 - DNA, 4853 bp, Hepatitis C virus
tcgcccacaggacgttaagttcccgggtggcggtcagatcgttggtggagtttacttgttgccgcgcaggggccctagaatgggtgtgcgcgcgccgaggaagacttccgagcggtcgcaacctcgagtagacgtcagcctatccccaaggcacgtcggcccgagggcaggacctgggctcagcccgggtacccttggcccctctatggcaatgagggctgcgggtgggcgggatggctcctgtccccccgcggtctcggcctagttggggccccacagacccccggcgtaggtcgcgcaatttgggtaaggtcatcgacacccttacgtgcggcttcgccgacctcatggggtacataccgctcgtcggcgcccctcttggaggcgctgccaggccctggcgcatggcgttcgggttctggaagacggcgtgaactatgcaacagggaaccttcctggttgctctttctctatcttctttctggccctgctctcttgtctgactgtgcccgcttcggcctacaagtgcgcaactctacagggctctaccacgtcaccaatgattgccctaactcgagtattgtgtacgaggcgcctgatgccatcctgcacactccggggtgtgtcccttgcgttcgcgagggtaacgcctcgaggtgttggtggcgatgacccccacggtggccaccagggacggcaaactccccgcgacgcagcttcgacgtcacatcgatctgcttgtcgggagcgccaccctctgttcggctctttacgtgggggacctgtgcggtctgtctttcttgtgggtcaactgtttaccttctcccccaggcgccactggacgacgcaagactgcaattgctctatctatcccggccatataacgggtcaccgcatggcatgggatatgatgatgaactggtccccgacgcggcgttggtaatggctcagctgctccggatcccgcaagccatcttggacatgatcgctggtgcccactggggagtcttggcgggcatagcgtatttctccatggtggggaactgggcgaaggtcctgtagtgctgctgctattcgccggcgtcgacgcggaaaccatgaccaccgggggggccgccgctcgcaacgtgtatagaatttccagcttcttctcgccgggcccccagcagaacatccagctgatcaacaccaacggcagtggcacatcaataggacggccttgaactgcaacgacagccttaacaccggctggttagcagggcttttctatcatcgcagcttcaactcttcaggctgtcctgcgaggctggccagctgccgacgcctaccgactttgcccagggctggggccctatcagccatgccaacggcagcggccccgaccaacgcccctactgttggcactaccccccaaaaccttgcggtattgtgcccgcacggaacgtgtgtggcccggtatattgcttccccccagtcccgtggcggtgggaacgaccgacagggcgggcgtccctacctaccgctggggtgaaaatgaaacggacgtcttcgtccttaacaacaccaggccaccgctgggcaattggttcggttgacctggatgaattcaactggattcaccaaagtgtgcggagcgcctccttgtgtcatcggaggagtgggcaacgacaccttgtactgccccactgattgtttccgcaagcatccggaagccacatattcccggtgcggctccgtccctggattacacccagatgcctggttgactacccgtataggctttggcattatccttgtaccgtcaactacaccatattcaaagtcaggatgtatgtgggaggggtcgagcataggctggatgcgcctgcaactggacgcggggcgaacgttgcgatctggaagacagggacaggtccgagctcagcccgttgctgctgtccactacacagtggcaggtccttccgtgctccttcacgaccttgccagccttgtccaccggcctctccacctccaccagaacattgtggacgtgcagtacctgtacggggtagggtcaagcatcgcgtcctgggccattaagtgggagtacgtcgttctcctgttccttctgcttgcagacgcgcgcgtctgtcctgcctgtggatgatgctactcatatcccaagcggaggcggctttggagaacctcgtaatactcaatgcagcatccctggccgggacgcaaggtcttgtatccttcctcgtgttcttctgctttgcgtggtatctgaaggtaggtgggtgccaggagcggtttacgccctctacggaatgtggcctctcctcctgctcctgttggcgttgccccagcgggcatacgcgctggacacggaggtggccgcgtcgtgtggcggcgttgtcttgtcgggttgatgatgctgactctgtcaccgtattacaagcgctatatcagctggtgcttatggtggcttcagtattttctgactagggcagaagcgcaactgcacgtgtgggttccccccctcaacgttcgagggggggcgacgctgccatcttactcacatgcgttgtacacccgactctggtatttgacatcaccaaactactgctggctgtcctcggacccctttggattcttcaagccagtttgcttaaagtaccctacttgtgcgcgtccaaggccttctccggatctgcgcgttagcgcggaagatggtcggaggccactacgtgcaaatggttatcatcaagttagggatgcttactggcacctatgtttataaccatctcacccccctccgggactggcgcacaacggcctgcgagatctggccgtggctgtagaaccagtcgtcttctcccaaatggagaccaagctcatcacgtggggggcagacactgccgcgtgcggtgacatcatcaacggcttgcccgttccgcccgtaggggccaggagatactgctcggaccagccgatggaatggtctccaaggggtggaggttgctggcgcccatcacggcgtacgcccagcagacaaggggcctcctagggtgcataatcaccagcctaaccggcgggataaaaaccaagtggagggtgaggtccagattgtgtcaactgctgcccaaactttcctggcaacgtgcatcagtggggtatgctggactgtctaccacggggccggaacgaggactattgcatctccaaaggccctgttatccagatgtataccaatgtggacaaagaccttgtgggctggcccgctcctcaaggtgcccgctcattgacaccctgcacctgcggctcctcggacctttacctggtcacgaggcatgccgatgtctccccgtgcgccggcggggtgatagcaggggcagcctgctctcgccccggcccatttcctatctgaaaggctcctcggggggcccgctgttgtgccccgcgggacacgccgtaggcatattcagggcgcggtgtgcacccgtggagtggctaaggcggtggactttatccctgtggagaacctagagacaaccatgaggtccccggtgttcacggacaactcctctccgccagcagtgccccagagcttccaggtggcccacctgcatctcccacaggcagcggcaagagcaccaaggtcccggctgcgtatgcggctcagggctataaggtgctagtactcaacccctctgtcgctgcaacactgggctttggtgcttatatgtccaaggcccagggatcgatcctaatatcaggaccggggcgagaacaattaccactggcagccccatcacgtactccacctacggcaaatttcttgccgacggcgggtgctcggggggcgcttatgatataataatttgtgacgagtgccatccacggatgccacatccatcttgggcatcggcactgtccttgaccaggcagagaccgcgggggcgagactggttgtgctcgccaccgccacccctccgggctccgtcactgtgccccatcctaacatgaggaggttgctctgtccaccaccggagagattcctttctatggcaaggctatccccctcgaagtaatcaaaggggggagacatctcattttttgtcactcaaagaagaagtgcgacgagctcgccgcaaagctagtcgcatgggcatcaatgccgtggcctactaccgcggtcttgacgtgtctgtcatcccgaccagcggcgatgttgtcgtcgtggcaactgatgctctcatgaccggctttaccggcgacttcgactcggtgatgactgcaacacgtgtgtcacccagacggtcgacttcagccttgaccctactttcaccattgagacaaccacgcttccccaggatgctgtctcccgcactcaacgtcggggtaggactggcagggggaagccaggcatctacgatttgtggcaccgggggagcgcccctccggcatgttcgactcgtccatcctctgtgagtgctatgacgcgggctgtgcttggtatgagctcacgcccgccgagactacagttagactacgagcgtaatgaacaccccggggcttcccgtgtgccaagaccatcttgaattttgggagggcgtcttcacaggcctcactcatatagatgcccacttcctatcccaaacaaagcagagtggggagaatcttccttacctggtagcgtacaagccaccgtgtgcgctagggctcaagcccctcccccatcgtgggaccagatgtggaagtgtttgatccgcctcaaacccaccctccatgggccaacacctctgctatacagactgggcgctgtccaaatgaggtcaccctgacgcacccagtcaccaaatacattatga

SEQ ID NO: 67 - DNA, 4853 bp, Hepatitis C virus; identical to SEQ ID NO: 23

SEQ ID NO: 68 - DNA, 4853 bp, Hepatitis C virus
tcgcccacaggacgttaagttcccgggtggcggtcagatcgttggtggagtttacttgttgccgcgcaggggccctagaatgggtgtgcgcgcgccgaggaagacttccgagcggtcgcaacctcgagtagacgtcagcctatccccaaggcacgtcggcccgagggtaggacctgggctcagcccgggtacccttggcccctctatggcaatgagggctgcgggtgggcgggatggctcctgtctccccgcggtctcggcctagttggggccccacagacccccggcgtaggtcgcgcaatttgggtaaggtcatcgatacccttacgtgcggcttcgccgacctcatggggtacataccgctcgtcggcgcccctcttggaggcgctgccaggccctggcgcatggcgtccgggttctggaagacggcgtgaactatgcaacggggaaccttcccggttgctctttctctatcttccttctggccctgctctcttgtctgactgtgcccgcttcggcctacaagtgcgcaactccacggggctttaccacgtcaccaatgattgccccaactcgagtattgtgtacgaggcgcctgatgccatcctgcacactccggggtgtgtcccttgcgttcgcgagggtaacgcctcgaggtgttggtggcgatgacccccacggtggccaccagggacggcaaactccctgcaacgcagctccgacgtcacatcgatctgcttgtcgggagtgccaccctctgttcggccctctacgtgggggacctgtgcggtctgtctttcttgttggtcaactgtttaccttctctcccaggcgccactggacgacgcaagactgcaattgttctatctatcccggccatataacgggccaccgcatggcatgggatatgatgatgaactggtccccgacgcggcgttggtaatggctcagctgctccggatcccgcaagccatcttggatatgatcgctggtgcccactggggagtcctggcgggcatagcgtatttctccatggtggggaactgggcgaaggtcctgtagtgctgctgctatttgccggcgtcgatgcgggaaccgtcgtcaccggaggggtcgccgcccgcaccgcgtatggatttactagtctcttcacgcgaggcgcccagcagaacatccagctgatcaacaccaacggcagtggcacatcaataggacggccttgaactgcaacgacagccttaacaccggctggttagcagggcttttctatcggaacaacttcaactcttcaggctgtcctcagaggttggccagctgccggcgcctgccgattttgcccagggctggggccctatcagccatgccaacggcagcggccccgaccaccgcccctactgctggcactaccccccaaaaccttgcggcattgtgcccgcacagaacgtgtgtggcccggtatattgcttcctcccagccccgtggcggtgggaacgaccgacagggcgggcatccctacctacagctggggtgaaaatgatacggacgtcttcgtccttaacaacaccaggccaccgctgggcaattggtttggttgacctggatgaactcaactggattcaccaaagtgtgtggagcgcccccttgtgtcatcggaggggtgggcaacaacaccttgcactgccccactgattgtttccgcaagcatccggaagccacatactcccggtgcggctccgtccctggattacacccagatgcctggtcgactacccgtataggctttggcattatccttgtaccatcaactataccatattcaaagtcaggatgtatgtgggaggggtcgagcataggctggatgcgcctgcaactggacgcggggcgaacgttgcgatctggaagacagggacaggtccgagctcagcccgttgctgctgtccactacacagtggcaggtccttccgtgttccttcacgaccttgccagccttgtccaccggtctctccacctccaccagaacatcgtggacgtgcagtacctgtacggggtggggtcaagcatcgcgtcctgggccatcaagtgggagtacgtcgttctcctgttccttctgcttgcagacgcgcgcgtctgtcctgcctgtggatgatgctactcatatcccaagcggaggcggctttggagaacctcgtaatactcaatgcagcatccctggccgggacgcaaggtcttgtatccttcctcgtgttcttctgctttgcatggtatctgaaggtaggtgggtgccaggagcggtttacgccctctacggaatgtggcctctcctcctgctcctgctggcgttgccccagcgggcatacgcgctggacacggaggtggccgcgtcgtgtggcggcgttgtctcgtcgggttgatggcgctgactctgtcaccgtattacaagcgctacatcagctggtgcttatggtggctccagtattttctgactagagcagaagcgcaactgcacgtgtgggttccccccctcaacgttcgagggggggcgacgccgtcatcttactcatgtgtgttgtacacccgactttggtatttgacatcaccaaactactgctggccgtcctcggacccctttggattcttcaagccagtttgcttaaagtaccctacttgtgcgcgtccaaggccttctccggatctgcgcgttagcgcggaagatggtcgggggccaatacgtgcaaatggttatcatcaagttagggacgcttactggcacctatgtttacaaccatctcactcctcttcgggactggcgcacaacggcctgcgagatctggccgtggctgtagagccagtcgtcttctcccaaatggagaccaagctcattacgtggggggcagacactgccgcgtgcggtgacatcatcaacggtctgcccgttccgcccgtaggggtcgggagatactgctcggaccagccgatggaatggtctccaaggggtggaggttgctggcgcccatcacggcgtacgcccagcagacaaggggcctcctagggtgcataatcaccagcctaaccggcgggacaaaaaccaagtggagggtgaggtccagattgtgtcaactgctgcccaaactttcctggcaacgtgcatcagtggggtatgctggactgtctaccacggggccggaacgaggactattgcatctccaaaggccccgttatccagatgtataccaatgtggacaaagaccttgtgggctggcccgctcctcaaggtgcccgctcattgacaccctgcacctgcggctcctcggacctttacctggtcacgaggcatgccgatgtctccccgtgcgccggcggggtgatagcaggggcagcctgctctcgccccggcccatttcctacttgaaaggctcctcggggggcccgctgttgtgccccgcgggacacgccgtaggcatattcagggcgcggtgtgcacccgtggagtggctaaggcggtggactttatccctgtggagaacctagagacaaccatgaggtccccggtgttcacggacaactcctctccgccagcagtgccccagagcttccaggtggcccacctgcatctcccacaggcagcggcaagagcaccaaggtcccggctgcatacgcggctcagggctataaggtgctagtgctcaacccttctgttgctgcaacattgggctttggtgcttacatgtccaaggcccagggatcgatcctaatatcaggaccggggcgagaacaattactactggcagccccatcacgtactccacctacggtaagttccttgccgacggcgggtgctcggggggcgcttatgatataataatttgtgacgagtgccacccacggatgccacatccatcttgggcatcggcactgtccttgaccaggcagagaccgcgggggcgagactggttgtgctcgccaccgccacccctccgggctccgtcactgtgccccaccccaacatgaggaggttgctctgtccaccaccggagagattcctttctatggcaaggctatccccctcgaagtaatcaaaggggggagacatctcattttttgtcactcaaagaagaagtgcgacgagctcgccgcaaagctggtcgcatgggcatcaatgccgtggcctactaccgcggtcttgatgtgtctgtcatcccgaccagcggcgatgttgtcgtcgtggcaactgatgctctcatgaccggctttaccggcgacttcgactcggtgatgactgcaacacgtgtgtcacccagacggtcgatttcagccttgaccctaccttcaccattgagacaaccacgcttccccaagacgctgtctcccgcactcaacgtcggggcaggactggcagggggaagccaggcatctacgatttgtggcaccgggggagcgcccttccggcatgttcgactcgtccgtcctctgtgagtgctatgacgcgggctgtgcttggtatgagctcacgcccgccgagactacagttagactacgagcgtaatgaacaccccggggcttcccgtgtgccaagaccatctcgaattttgggagggcgtcttcacaggcctcactcatatagatgcccacttcctatcccagacaaagcagagtggggagaatcttccttacctggtagcgtacaagccaccgtgtgcgctagggctcaagcccctcccccatcgtgggaccagatgtggaagtgtttgatccgcctcaaacccaccctccatgggccaacacctctgctatacagactgggcgctgtccaaatgaggtcaccttgacgcacccagtcactaaatacatcatga

SEQ ID NO: 69 - DNA, 4853 bp, Hepatitis C virus
tcgcccacaggacgttaagttcccgggtggcggtcagatcgttggtggagtttacttgttgccgcgcaggggccctagaatgggtgtgcgcgcgccgaggaagacttccgagcggtcgcaacctcgagtagacgtcagcctatccccaaggcacgtcggcccgagggcaggacctgggctcagcccgggtacccttggcccctctatggcaatgagggctgcgggtgggcgggatggctcctgtctccccgcggtctcggcctagttggggccccacagacccccggcgtaggtcgcgcaatttgggtaaggtcatcgatacccttacgtgcggcttcgccgacctcatggggtacataccgctcgtcggcgcccctcttggaggcgctgccaggccctggcgcatggcgtccgggtcctggaagacggcgtgaactatgcaacagggaaccttcctggttgctctttctctatcttccttctggccctgctctcttgtctgactgtgcccgcttcggcctacaagtgcgcaactccacggggctctatcacgtcaccaatgattgccctaactcgagtattgtgtacgaggcgcctgatgccatcctgcacactccggggtgtgtcccttgcgttcgcgagggtaatgcctcgaggtgttggtggcgatgacccccacggtggccaccagggacggcaaactccctgcgacgcagctccgacgtcacatcgatctgcttgtcgggagcgccaccctctgttcggccctctacgtgggggacctgtgcggtctgtctttcttgttggtcaactgtttaccttctctcccaggcgccactggacgacgcaagactgcaattgttctatctatcccggccatataacgggccaccgcatggcatgggatatgatgatgaactggtccccgacgcagcgttggtaatggctcagctgctccggatcccgcaagccatcttggacatgatcgctggtgctcactggggagtcctggcgggcatagcgtatttctccatggtggggaactgggcgaaggtcctgtagtgctgttgctattcgccggcgtcgatgcggaaaccgtcgtcaccggggggaccgccgctcgcaacgcgtacggactctctagtctcttcatgcggggccccaagcagaacatccagctgatcaacaccaacggcagtggcacatcaataggacggccttgaactgcaacgatagccttaacaccggctggctagcagggcttttctatcagcacaacttcaactcttcaggctgtcctgagaggctggccagctgccgacgcctgccgattttgcccagggctggggccctatcagccatgccaacggcagcggccccgaccaccgcccctactgctggcactaccccccaaaaccttgcggtattgtgcccgcacagaacgtgtgtggtccggtatattgcttcctcccagccccgtggcggtgggaacgaccgacaggtcgggcgtccctacctaccgctggggtgaaaatgagacggacgtcttcgtccttaacaacaccaggccaccgctgggcaattggtttggttgacctggatgaactcaactggattcaccaaagtgtgcggagcgcctccttgtgtcatcggaggggcgggcaacaacaccttgcactgccccaccgattgtttccgcaagcatccggaagccacatactcccggtgcggctccgtccctggattacacccagatgcatggtcgactacccgtataggctttggcattatccttgtaccatcaactataccatatttaaagtcaggatgtacgtgggaggggtcgagcataggctggatgtgcctgcaactggacgcggggcgaacgctgcgatctggaagacagggacaggtccgagctcagcccgttgctgctgtccaccacacagtggcaggtccttccgtgttccttcacgaccttgccggccttgtccaccggcctctccacctccaccagaacatcgtggacgtacagtacctgtacggggtggggtcaagcattgcgtcctgggccattaagtgggagtacgtcgttctcctgttccttctgcttgcagacgcgcgcgtctgtcctgcctgtggatgatgctactcatatcccaagcggaggcggctttggagaacctcgtaacactcaatgcagcatccctggccgggacgcaaggtcttgtatccttcctcgtgttcttctgtttcgcgtggtatctgaaggtaggtgggtgccaggagcggtttacgccctctacgggatgtggcctctcctcctgctcctgttggcgttgccccagcgggcatacgcgctggacacggaggtggccgcgtcgtgtggcggcgttgtctcgtcgggttgatggcgctgactctgtcaccgtattacaagcgctacatcagctggtgcttatggtggctccagtattttctgactagagcagaagcgcaactgcacgtatgggttccccccctcaacgctcgagggggggcgacgctgtcatcttactcatgtgtgttgtacacccgactttggtatttgacatcaccaaactactgctggccgtcctcggacccctttggatccttcaagccagtctgcttaaagtaccctacttgtgcgcgtccagggccttctccggatctgcgcgttagcgcggaagatggttgggggccactacgtgcaaatggttatcatcaagctagggacgcttactggcacctatgtttacaaccatctcactcctcttcgggactggcgcacaacggcctgcgagatctggccgtggctgtagagccagtcgtcttctcccaaatggagaccaagctcatcacatggggggcagacactgccgcgtgcggtgacatcatcaacggcttgcccgttccgcccgtaggggccgggagatactgctcggaccagccgatggaatggtctccaaggggtggaggttgctggcgcccatcacggcgtacgcccagcagacaaggggcctcttaggatgcataatcaccagcctgaccggcgggacaaaaaccaagtggagggtgaagtccagattgtgtcaactgctgcccaaactttcctcgcaacgtgcatcagtggggtatgctggactgtctaccacggggccggaacgaggactattgcatctccaaaggccctgttatccagatgtataccaatgtggacaaagaccttgtgggctggcccgcccctcaaggtgcccgctcattgacgccctgcacctgcggctcctcggacctttacctggtcacgaggcatgccgatgtctccccgtgcgccggcggggtgatagcaggggcagcctgctttcgccccggcccatttcctatttgaaaggttcctcggggggcccgctgttgtgccccgcgggacacgccgtaggcatattcagggcgcggtgtgcacccgtggagtggctaaggcggtggactttatccccgtggagaacctagagacaaccatgaggtccccggtgtttacggacaactcctccccgccagcagtgccccagagcttccaggtggcccacctgcatctcccacgggcagcggcaagagcaccaaggtcccagctgcatatgcggctcagggctataaagtgctagtgctcaacccctctgttgctgcaacactgggctttggtgcttatatgtccaaggcccagggattgatcctaacatcaggaccggggcgagaacaattaccactggcagccccatcacgtactccacctacggcaagttccttgccgacggcgggtgctcggggggcgcctatgatataataatttgtgacgagtgccacccacggatgccacatccatcttgggcatcggcactgtccttgaccaggcagagaccgcgggggcgagactagttgtgctcgccaccgccacccctccgggctccatcactgtgccccatcctaacatgaggaggttgctctgtccaccaccggagagattcctttctatggcaaggctatccccctcgaagtaatcaaaggggggagacatctcattttttgtcactcaaagaagaagtgcgatgagctcgccgcaaagctggtcgcatgggcatcaatgccgtggcctactaccgcggtcttgacgtgtccgtcatcccgaccagcggcgatgttgtcgtcgtggcaactgatgctctcatgaccggttttaccggcgacttcgactcggtgatgactgcaacacgtgtgtcacccagacggtcgatttcagccttgaccctaccttcaccattgagacaaccacgcttccccaagatgctgtctcccgcactcagcgtcggggcaggactggcagggggaagccaggcatctacggtttgtggcaccaggggagcgcccttccggcatgttcgactcgtccatcctctgtgagtgctatgacgcgggttgtgcttggtatgagctcacacccgccgagactacagttagactacgagcgtaatgaacaccccggggcttcccgtgtgccaagaccatctcgaattttgggagggggtcttcacaggcctcactcatatagatgcccacttcctatcccagacaaagcagagtggggagaatcttccttacctggtagcgtacaagccaccgtgtgcgctagggctcaagcccctcccccatcgtgggaccagatgtggaagtgtttgatccgcctcaaacccacccttcatgggccaacacctctgctatacagactgggtgctgtccaaatgaggtcaccctgacgcacccagtcaccaaatatatcatga

SEQ ID NO: 70 - DNA, 4853 bp, Hepatitis C virus; identical to SEQ ID NO: 49

SEQ ID NO: 71 - DNA, 4853 bp, Hepatitis C virus
tcgcccacaggacgttaagttcccgggtggcggtcagatcgttggtggagtttacttgttgccgcgcaggggccctagaatgggtgtgcgcgcgccgaggaagacttccgagcggtcgcaacctcgagtagacgtcagcctatccccaaggcacgtcggcccgagggcaggacctgggctcagcccgggtacccttggcccctctatggcaatgagggctgcgggtgggcgggatggctcctgtccccccgcggtctcggcctagttggggccccacagacccccggcgtaggtcgcgcaatttgggtaaggtcatcgacacccttacgtgcggcttcgccgacctcatggggtacataccgctcgtcggcgcccctcttggaggcgctgccaggccctggcgcacggcgttcgggttctggaagacggcgtgaactatgcaacagggaaccttcctggttgctctttctctatcttctttctggccctgctctcttgtctgactgtgcccgcttcggcctacaagtgcgcaactctacagggctctaccacgtcaccaatgattgccctaactcgagtattgtgtacgaggcgcctgatgccatcctgcacactccggggtgtgtcccttgcgttcgcgagggtaacgcctcgaggtgttggtggcgatgacccccacggtggccaccagggacggcaaactccccgcgacgcagcttcgacgtcacatcgatctgcttgtcgggagcgccaccctctgttcggctctttacgtgggggacctgtgcggtctgtctttcttgtgggtcaactgtttaccttctcccccaggcgccactggacgacgcaagactgcaattgctctatctatcccggccatataacgggtcaccgcatggcatgggatatgatgatgaactggtccccgacgcggcgttggtaatggctcagctgctccggatcccgcaagccatcttggacatgatcgctggtgcccactggggagtcttggcgggcatagcgtatttctccatggtggggaactgggcgaaggtcctgtagtgctgctgctattcgccggcgtcgacgcggaaaccatgaccaccgggggggccgccgctcgcaacgtgtatagaatttccagcttcttctcgccgggcccccagcagaacatccagctgatcaacaccaacggcagtggcacatcaataggacggccttgaactgcaacgacagccttaacaccggctggttagcagggcttttctatcatcgcagcttcaactcttcaggctgtcctgcgaggctggccagctgccgacgcctaccgactttgcccagggctggggccctatcagccatgccaacggcagcggccccgaccaacgcccctactgttggcactaccccccaaaaccttgcggtattgtgcccgcacggaacgtgtgtggcccggtatattgcttccccccagtcccgtggcggtgggaacgaccgacagggcgggcgtccctacctaccgctggggtgaaaatgaaacggacgtcttcgtccttaacaacaccaggccaccgctgggcaattggttcggttgacctggatgaattcaactggattcaccaaagtgtgcggagcgcctccttgtgtcatcggaggagtgggcaacgacaccttgtactgccccactgattgtttccgcaagcatccggaagccacatattcccggtgcggctccgtccctggattacacccagatgcctggttgactacccgtataggctttggcattatccttgtaccgtcaactacaccatattcaaagtcaggatgtatgtgggaggggtcgagcataggctggatgcgcctgcaactggacgcggggcgaacgttgcgatctggaagacagggacaggtccgagctcagcccgttgctgctgtccactacacagtggcaggtccttccgtgctccttcacgaccttgccagccttgtccaccggcctctccacctccaccagaacattgtggacgtgcagtacctgtacggggtagggtcaagcatcgcgtcctgggccattaagtgggagtacgtcgttctcctgttccttctgcttgcagacgcgcgcgtctgtcctgcctgtggatgatgctactcatatcccaagcggaggcggctttggagaacctcgtaatactcaatgcagcatccctggccgggacgcaaggtcttgtatccttcctcgtgttcttctgctttgcgtggtatctgaaggtaggtgggtgccaggagcggtttacgccctctacggaatgtggcctctcctcctgctcctgttggcgttgccccagcgggcatacgcgctggacacggaggtggccgcgtcgtgtggcggcgttgtcttgtcgggttgatgatgctgactctgtcaccgtattacaagcgctatatcagctggtgcttatggtggcttcagtattttctgactagggcagaagcgcaactgcacgtgtgggttccccccctcaacgttcgagggggggcgacgctgccatcttactcacatgcgttgtacacccgactctggtatttgacatcaccaaactactgctggctgtcctcggacccctttggattcttcaagccagtttgcttaaagtaccctacttgtgcgcgtccaaggccttctccggatctgcgcgttagcgcggaagatggtcggaggccactacgtgcaaatggttatcatcaagttagggatgcttactggcacctatgtttataaccatctcacccccctccgggactggcgcacaacggcctgcgagatctggccgtggctgtagaaccagtcgtcttctcccaaatggagaccaagctcatcacgtggggggcagacactgccgcgtgcggtgacatcatcaacggcttgcccgttccgcccgtaggggccaggagatactgctcggaccagccgatggaatggtctccaaggggtggaggttgctggcgcccatcacggcgtacgcccagcagacaaggggcctcctagggtgcataatcaccagcctaaccggcgggataaaaaccaagtggagggtgaggtccagattgtgtcaactgctgcccaaactttcctggcaacgtgcatcagtggggtatgctggactgtctaccacggggccggaacgaggactattgcatctccaaaggccctgttatccagatgtataccaatgtggacaaagaccttgtgggctggcccgctcctcaaggtgcccgctcattgacaccctgcacctgcggctcctcggacctttacctggtcacgaggcatgccgatgtctccccgtgcgccggcggggtgatagcaggggcagcctgctctcgccccggcccatttcctatctgaaaggctcctcggggggcccgctgttgtgccccgcgggacacgccgtaggcatattcagggcgcggtgtgcacccgtggagtggctaaggcggtggactttatccctgtggagaacctagagacaaccatgaggtccccggtgttcacggacaactcctctccgccagcagtgccccagagcttccaggtggcccacctgcatctcccacaggcagcggcaagagcaccaaggtcccggctgcgtatgcggctcagggctataaggtgctagtactcaacccctctgtcgctgcaacactgggctttggtgcttatatgtccaaggcccagggatcgatcctaatatcaggaccggggcgagaacaattaccactggcagccccatcacgtactccacctacggcaaatttcttgccgacggcgggtgctcggggggcgcttatgatataataatttgtgacgagtgccatccacggatgccacatccatcttgggcatcggcactgtccttgaccaggcagagaccgcgggggcgagactggttgtgctcgccaccgccacccctccgggctccgtcactgtgccccatcctaacatgaggaggttgctctgtccaccaccggagagattcctttctatggcaaggctatccccctcgaagtaatcaaaggggggagacatctcattttttgtcactcaaagaagaagtgcgacgagctcgccgcaaagctagtcgcatgggcatcaatgccgtggcctactaccgcggtcttgacgtgtccgtcatcccgaccagcggcgatgttgtcgtcgtggcaactgatgctctcatgaccggctttaccggcgacttcgactcggtgatgactgcaacacgtgtgtcacccagacggtcgacttcagccttgaccctactttcaccattgagacaaccacgcttccccaggatgctgtctcccgcactcaacgtcggggtaggactggcagggggaagccaggcatctacgatttgtggcaccgggggagcgcccctccggcatgttcgactcgtccatcctctgtgagtgctatgacgcgggctgtgcttggtatgagctcacgcccgccgagactacagttagactacgagcgtaatgaacaccccggggcttcccgtgtgccaagaccatcttgaattttgggagggcgtcttcacaggcctcactcatatagatgcccacttcctatcccaaacaaagcagagtggggagaatcttccttacctggtagcgtacaagccaccgtgtgcgctagggctcaagcccctcccccatcgtgggaccagatgtggaagtgtttgatccgcctcaaacccaccctccatgggccaacacctctgctatacagactgggcgctgtccaaatgaggtcaccctgacgcacccagtcaccaaatacattatga

SEQ ID NO: 72 - DNA, 4853 bp, Hepatitis C virus
tcgcccacaggacgttaagttcccgggtggcggtcagatcgttggtggagtttacttgttgccgcgcaggggccctagaatgggtgtgcgcgcgccgaggaagacttccgagcggtcgcaacctcgagtagacgtcagcctatccccaaggcacgtcggcccgagggtaggacctgggctcagcccgggtacccttggcccctctatggcaatgagggctgcgggtgggcgggatggctcctgtctccccgcggtctcggcctagttggggccccacagacccccggcgtaggtcgcgcaatttgggtaaggtcatcgatacccttacgtgcggcttcgccgacctcatggggtacataccgctcgtcggcgcccctcttggaggcgctgccaggccctggcgcatggcgtccgggttctggaagacggcgtgaactatgcaacggggaaccttcccggttgctctttctctatcttccttctggccctgctctcttgtctgactgtgcccgcttcggcctacaagtgcgcaactccacggggctttaccacgtcaccaatgattgccccaactcgagtattgtgtacgaggcgcctgatgccatcctgcacactccggggtgtgtcccttgcgttcgcgagggtaacgcctcgaggtgttggtggcgatgacccccacggtggccaccagggacggcaaactccctgcaacgcagctccgacgtcacatcgatctgcttgtcgggagtgccaccctctgttcggccctctacgtgggggacctgtgcggtctgtctttcttgttggtcaactgtttaccttctctcccaggcgccactggacgacgcaagactgcaattgttctatctatcccggccatataacgggccaccgcatggcatgggatatgatgatgaactggtccccgacgcggcgttggtaatggctcagctgctccggatcccgcaagccatcttggatatgatcgctggtgcccactggggagtcctggcgggcatagcgtatttctccatggtggggaactgggcgaaggtcctgtagtgctgctgctatttgccggcgtcgatgcgggaaccgtcgtcaccggaggggtcgccgcccgcaccgcgtatggatttactagtctcttcacgcgaggcgcccagcagaacatccagctgatcaacaccaacggcagtggcacatcaataggacggccttgaactgcaacgacagccttaacaccggctggttagcagggcttttctatcggaacaacttcaactcttcaggctgtcctcagaggttggccagctgccggcgcctgccgattttgcccagggctggggccctatcagccatgccaacggcagcggccccgaccaccgcccctactgctggcactaccccccaaaaccttgcggcattgtgcccgcacagaacgtgtgtggcccggtatattgcttcctcccagccccgtggcggtgggaacgaccgacagggcgggcatccctacctacagctggggtgaaaatgatacggacgtcttcgtccttaacaacaccaggccaccgctgggcaattggtttggttgacctggatgaactcaactggattcaccaaagtgtgtggagcggccccttgtgtcatcggaggggtgggcaacaacaccttgcactgccccactgattgtttccgcaagcatccggaagccacatactcccggtgcggctccgtccctggattacacccagatgcctggtcgactacccgtataggctttggcattatccttgtaccatcaactataccatattcaaagtcaggatgtatgtgggaggggtcgagcataggctggatgcgcctgcaactggacgcggggcgaacgttgcgatctggaagacagggacaggtccgagctcagcccgttgctgctgtccactacacagtggcaggtccttccgtgttccttcacgaccttgccagccttgtccaccggtctctccacctccaccagaacatcgtggacgtgcagtacctgtacggggtggggtcaagcatcgcgtcctgggccatcaagtgggagtacgtcgttctcctgttccttctgcttgcagacgcgcgcgtctgtcctgcctgtggatgatgctactcatatcccaagcggaggcggctttggagaacctcgtaatactcaatgcagcatccctggccgggacgcaaggtcttgtatccttcctcgtgttcttctgctttgcatggtatctgaaggtaggtgggtgccaggagcggtttacgccctctacggaatgtggcctctcctcctgctcctgctggcgttgccccagcgggcatacgcgctggacacggaggtggccgcgtcgtgtggcggcgttgtctcgtcgggttgatggcgctgactctgtcaccgtattacaagcgctacatcagctggtgcttatggtggctccagtattttctgactagagcagaagcgcaactgcacgtgtgggttccccccctcaacgttcgagggggggcgacgccgtcatcttactcatgtgtgttgtacacccgactttggtatttgacatcaccaaactactgctggccgtcctcggacccctttggattcttcaagccagtttgcttaaagtaccctacttgtgcgcgtccaaggccttctccggatctgcgcgttagcgcggaagatggtcgggggccaatacgtgcaaatggttatcatcaagttagggacgcttactggcacctatgtttacaaccatctcactcctcttcgggactggcgcacaacggcctgcgagatctggccgtggctgtagagccagtcgtcttctcccaaatggagaccaagctcatcacgtggggggcagacactgccgcgtgcggtgacatcatcaacggtctgcccgttccgcccgtaggggtcgggagatactgctcggaccagccgatggaatggtctccaaggggtggaggttgctggcgcccatcacggcgtacgcccagcagacaaggggcctcctagggtgcataatcaccagcctaaccggcgggacaaaaaccaagtggagggtgaggtccagattgtgtcaactgctgcccaaactttcctggcaacgtgcatcagtggggtatgctggactgtctaccacggggccggaacgaggactattgcatctccaaaggccccgttatccagatgtataccaatgtggacaaagaccttgtgggctggcccgctcctcaaggtgcccgctcattgacaccctgcacctgcggctcctcggacctttacctggtcacgaggcatgccgatgtctccccgtgcgccggcggggtgatagcaggggcagcctgctctcgccccggcccatttcctacttgaaaggctcctcggggggcccgctgttgtgccccgcgggacacgccgtaggcatattcagggcgcggtgtgcacccgtggagtggctaaggcggtggactttatccctgtggagaacctagagacaaccatgaggtccccggtgttcacggacaactcctctccgccagcagtgccccagagcttccaggtggcccacctgcatctcccacaggcagcggcaagagcaccaaggtcccggctgcatacgcggctcagggctataaggtgctagtgctcaacccttctgttgctgcaacattgggctttggtgcttacatgtccaaggcccagggatcgatcctaatatcaggaccggggcgagaacaattactactggcagccccatcacgtactccacctacggtaagttccttgccgacggcgggtgctcggggggcgcttatgatataataatttgtgacgagtgccacccacggatgccacatccatcttgggcatcggcactgtccttgaccaggcagagaccgcgggggcgagactggttgtgctcgccaccgccacccctccgggctccgtcactgtgccccaccccaacatgaggaggttgctctgtccaccaccggagagattcctttctatggcaaggctatccccctcgaagtaatcaaaggggggagacatctcattttttgtcactcaaagaagaagtgcgacgagctcgccgcaaagctggtcgcatgggcatcaatgccgtggcctactaccgcggtcttgatgtgtctgtcatcccgaccagcggcgatgttgtcgtcgtggcaactgatgctctcatgaccggctttaccggcgacttcgactcggtgatgactgcaacacgtgtgtcacccagacggtcgatttcagccttgaccctaccttcaccattgagacaaccacgcttccccaagacgctgtctcccgcactcaacgtcggggcaggactggcagggggaagccaggcatctacgatttgtggcaccgggggagcgcccttccggcatgttcgactcgtccgtcctctgtgagtgctatgacgcgggctgtgcttggtatgagctcacgcccgccgagactacagttagactacgagcgtaatgaacaccccggggcttcccgtgtgccaagaccatctcgaattttgggagggcgtcttcacaggcctcactcatatagatgcccacttcctatcccagacaaagcagagtggggagaatcttccttacctggtagcgtacaagccaccgtgtgcgctagggctcaagcccctcccccatcgtgggaccagatgtggaagtgtttgatccgcctcaaacccaccctccatgggccaacacctctgctatacagactgggcgctgtccaaatgaggtcaccttgacgcacccagtcactaaatacatcatga

SEQ ID NO: 73 - DNA, 4853 bp, Hepatitis C virus; identical to SEQ ID NO: 34

SEQ ID NO: 74 - DNA, 4853 bp, Hepatitis C virus
tcgcccacaggacgttaagtttccgggtggcggtcagatcgttggtggagtttacttgttgccgcgcaggggccctagaatgggtgtgcgcgcgccgaggaagacttccgagcggtcgcaacctcgagtagacgtcagcctatccccaaggcacgtcggcccgagggcaggacctgggctcagcccgggtacccttggcccctctatggcaatgagggctgcgggtgggcgggatggctcctgtccccccgcggtctcggcctagttggggccccacagacccccggcgtaggtcgcgcaatttgggtaaggtcatcgacacccttacgtgcggcttcgccgacctcatggggtacataccgctcgtcggcgcccctcttggaggcgctgccaggccctggcgcatggcgttcgggttctggaagacggcgtgaactatgcaacagggaaccttcctggttgctctttctctatcttctttctggccctgctctcttgtctgactgtgcccgcttcggcctacaagtgcgcaactctacagggctctaccacgtcaccaatgattgccctaactcgagtattgtgtacgaggcgcctgatgccatcctgcacactccggggtgtgtcccttgcgttcgcgagggtaacgcctcgaggtgttggtggcgatgacccccacggtggccaccagggacggcaaactccccgcgacgcagcttcgacgtcacatcgatctgcttgtcgggagcgccaccctctgttcggctctttacgtgggggacctgtgcggtctgtctttcttgtgggtcaactgtttaccttctcccccaggcgccactggacgacgcaagactgcaattgctctatctatcccggccatataacgggtcaccgcatggcatgggatatgatgatgaactggtccccgacgcggcgttggtaatggctcagctgctccggatcccgcaagccatcttggacatgatcgctggtgcccactggggagtcttggcgggcatagcgtatttctccatggtggggaactgggcgaaggtcctgtagtgctgctgctattcgccggcgtcgacgcggaaaccatgaccaccgggggggccgccgctcgcaacgtgtatagaatttccagcttcttctcgccgggcccccagcagaacatccagctgatcaacaccaacggcagtggcacatcaataggacggccttgaactgcaacgacagccttaacaccggctggttagcagggcttttctatcatcgcagcttcaactcttcaggctgtcctgcgaggctggccagctgccgacgcctaccgactttgcccagggctggggccctatcagccatgccaacggcagcggccccgaccaacgcccctactgttggcactaccccccaaaaccttgcggtattgtgcccgcacggaacgtgtgtggcccggtatattgcttccccccagtcccgtggcggtgggaacgaccgacagggcgggcgtccctacctaccgctggggtgaaaatgaaacggacgtcttcgtccttaacaacaccaggccaccgctgggcaattggttcggttgacctggatgaattcaactggattcaccaaagtgtgcggagcgcctccttgtgtcatcggaggagtgggcaacgacaccttgtactgccccactgattgtttccgcaagcatccggaagccacatattcccggtgcggctccgtccctggattacacccagatgcctggttgactacccgtataggctttggcattatccttgtaccgtcaactacaccatattcaaagtcaggatgtatgtgggaggggtcgagcataggctggatgcgcctgcaactggacgcggggcgaacgttgcgatctggaagacagggacaggtccgagctcagcccgttgctgctgtccactacacagtggcaggtccttccgtgctccttcacgaccttgccagccttgtccaccggcctctccacctccaccagaacattgtggacgtgcagtacctgtacggggtagggtcaagcatcgcgtcctgggccattaagtgggagtacgtcgttctcctgttccttctgcttgcagacgcgcgcgtctgtcctgcctgtggatgatgctactcatatcccaagcggaggcggctttggagaacctcgtaatactcaatgcagcatccctggccgggacgcaaggtcttgtatccttcctcgtgttcttctgctttgcgtggtatctgaaggtaggtgggtgccaggagcggtttacgccctctacggaatgtggcctctcctcctgctcctgttggcgttgccccagcgggcatacgcgctggacacggaggtggccgcgtcgtgtggcggcgttgtcttgtcgggttgatgatgctgactctgtcaccgtattacaagcgctatatcagctggtgcttatggtggcttcagtattttctgactagggcagaagcgcaactgcacgtgtgggttccccccctcaacgttcgagggggggcgacgctgccatcttactcacatgcgttgtacacccgactctggtatttgacatcaccaaactactgctggctgtcctcggacccctttggattcttcaagccagtttgcttaaagtaccctacttgtgcgcgtccaaggccttctccggatctgcgcgttagcgcggaagatggtcggaggccactacgtgcaaatggttatcatcaagttagggatgcttactggcacctatgtttataaccatctcacccccctccgggactggcgcacaacggcctgcgagatctggccgtggctgtagaaccagtcgtcttctcccaaatggagaccaagctcatcacgtggggggcagacactgccgcgtgcggtgacatcatcaacggcttgcccgttccgcccgtaggggccaggagatactgctcggaccagccgatggaatggtctccaaggggtggaggttgctggcgcccatcacggcgtacgcccagcagacaaggggcctcctagggtgcataatcaccagcctaaccggcgggataaaaaccaagtggagggtgaggtccagattgtgtcaactgctgcccaaactttcctggcaacgtgcatcagtggggtatgctggactgtctaccacggggccggaacgaggactattgcatctccaaaggccctgttatccagatgtataccaatgtggacaaagaccttgtgggctggcccgctcctcaaggtgcccgctcattgacaccctgcacctgcggctcctcggacctttacctggtcacgaggcatgccgatgtctccccgtgcgccggcggggtgatagcaggggcagcctgctctcgccccggcccatttcctatctgaaaggctcctcggggggcccgctgttgtgccccgcgggacacgccgtaggcatattcagggcgcggtgtgcacccgtggagtggctaaggcggtggactttatccctgtggagaacctagagacaaccatgaggtccccggtgttcacggacaactcctctccgccagcagtgccccagagcttccaggtggcccacctgcatctcccacaggcagcggcaagagcaccaaggtcccggctgcgtatgcggctcagggctataaggtgctagtactcaacccctctgtcgctgcaacactgggctttggtgcttatatgtccaaggcccagggatcgatcctaatatcaggaccggggcgagaacaattaccactggcagccccatcacgtactccacctacggcaaatttcttgccgacggcgggtgctcggggggcgcttatgatataataatttgtgacgagtgccatccacggatgccacatccatcttgggcatcggcactgtccttgaccaggcagagaccgcgggggcgagactggttgtgctcgccaccgccacccctccgggctccgtcactgtgccccatcctaacatgaggaggttgctctgtccaccaccggagagattcctttctatggcaaggctatccccctcgaagtaatcaaaggggggagacatctcattttttgtcactcaaagaagaagtgcgacgagctcgccgcaaagctagtcgcatgggcatcaatgccgtggcctactaccgcggtcttgacgtgtccgtcatcccgaccagcggcgatgttgtcgtcgtggcaactgatgctctcatgaccggctttaccggcgacttcgactcggtgatgactgcaacacgtgtgtcacccagacggtcgacttcagccttgaccctactttcaccattgagacaaccacgcttccccaggatgctgtctcccgcactcaacgtcggggtaggactggcagggggaagccaggcatctacgatttgtggcaccgggggagcgcccctccggcatgttcgactcgtccatcctctgtgagtgctatgacgcgggctgtgcttggtatgagctcacgcccgccgagactacagttagactacgagcgtaatgaacaccccggggcttcccgtgtgccaagaccatcttgaattttgggagggcgtcttcacaggcctcactcatatagatgcccacttcctatcccaaacaaagcagagtggggagaatcttccttacctggtagcgtacaagccaccgtgtgcgctagggctcaagcccctcccccatcgtgggaccagatgtggaagtgtttgatccgcctcaaacccaccctccatgggccaacacctctgctatacagactgggcgctgtccaaatgaggtcaccctgacgcacccagtcaccaaatacattatga

SEQ ID NO: 75 - DNA, 4854 bp, Hepatitis C virus
tcgcccacaggacgttaagttcccgggtggcggtcagatcgttggtggagtttacttgttgccgcgcaggggccctagaatgggtgtgcgcgcgccgaggaagacttccgagcggtcgcaacctcgagtagacgtcagcctatccccaaggcacgtcggcccgagggcaggacctgggctcagcccgggtacccttggcccctctatggcaatgagggctgcgggtgggcgggatggctcctgtctccccgcggtctcggcctagttggggccccacagacccccggcgtaggtcgcgcaatttgggtaaggtcatcgatacccttacgtgcggcttcgccgacctcatggggtacataccgctcgtcggcgcccctcttggaggcgctgccaggccctggcgcatggcgtccgggtcctggaagacggcgtgaactatgcaacagggaaccttcctggttgctctttctctatcttccttctggccctgctctcttgtctgactgtgcccgcttcggcctacaagtgcgcaactccacggggctctatcacgtcaccaatgattgccctaactcgagtattgtgtacgaggcgcctgatgccatcctgcacactccggggtgtgtcccttgcgttcgcgagggtaatgcctcgaggtgttggtggcgatgacccccacggtggccaccagggacggcaaactccctgcgacgcagctccgacgtcacatcgatctgcttgtcgggagcgccaccctctgttcggccctctacgtgggggacctgtgcggtctgtctttcttgttggtcaactgtttaccttctctcccaggcgccactggacgacgcaagactgcaattgttctatctatcccggccatataacgggccaccgcatggcatgggatatgatgatgaactggtccccgacgcagcgttggtaatggctcagctgctccggatcccgcaagccatcttggacatgatcgctggtgctcactggggagtcctggcgggcatagcgtatttctccatggtggggaactgggcgaaggtcctgtagtgctgttgctattcgccggcgtcgatgcggaaaccgtcgtcaccggggggaccgccgcctcgcaacgcgtacggactctctagtctcttcatgcggggccccaagcagaacatccagctgatcaacaccaacggcagtggcacatcaataggacggccttgaactgcaacgatagccttaacaccggctggctagcagggcttttctatcagcacaacttcaactcttcaggctgtcctgagaggctggccagctgccgacgcctgccgattttgcccagggctggggccctatcagccatgccaacggcagcggccccgaccaccgcccctactgctggcactaccccccaaaaccttgcggtattgtgcccgcacagaacgtgtgtggtccggtatattgcttactcccagccccgtggcggtgggaacgaccgacaggtcgggcgtccctacctaccgctggggtgaaaatgagacggacgtcttcgtccttaacaacaccaggccaccgctgggcaattggtttggtttacctggatgaactcaactggattcaccaaagtgtgcggagcgcctccttgtgtcatcggaggggcgggcaacaacaccttgcactgccccaccgattgtttccgcaagcatccggaagccacatactcccggtgcggctcggtccctggattacacccagatgcatggtcgactacccgtataggctttggcattatccttgtaccatcaactataccatatttaaagtcaggatgtacgtgggaggggtcgagcataggctggatgtgcctgcaactggacgcggggcgaacgctgcgatctggaagacagggacaggtccgagctcagcccgttgctgctgtccaccacacagtggcaggtccttccgtgttccttcacgaccttgccggccttgtccaccggcctatccacctccaccagaacatcgtggacgtacagtacctgtacggggtggggtcaagcattgcgtcctgggccattaagtgggagtacgtcgttctcctgttccttctgcttgcagacgcgcgcgtctctcctgcctgtggatgatgctactcatatcccaagcggaggcggctttggagaacctcgtaacactcaatgcagcatccctggccgggacgcaaggtcttgtatccttcctcgtgttcttctgtttcgcgtggtatctgaaggtaggtgggtgccaggagcggtttacgccctctacgggatgtggcctctcctcctgctcctgttggcgttgccccagcgggcatacgcgctggacacggaggtggccgcgtcgtgtggcggcgttgtctcgtcgggttgatggcgctgactctgtcaccgtattacaagcgctacatcagctggtgcttatggtggctccagtattttctgactagagcagaagcgcaactgcacgtatgggttccccccctcaacgctcgagggggcgcgacgctgtcatcttactcatgtgtgttgtacacccgactttggtatttgacatcaccaaactactgctggccgtcctcggacccctttggattcttcaagccagtctgcttaaagtaccctacttgtgcgcgtccagggccttctccggatctgcgcgttagcgcggaagatggttgggggccactacgtgcaaatgattatcatcaagctagggacgcttactggcacctatgtttacaaccatctcactcctcttcgggactggcgcacaacggcctgcgagatctggccgtggctgtagagccagtcgtcttctcccaaatggagaccaagctcatcacatggggggcagacactgccgcgtgcggtgacatcatcaacggcttgcccgctccgcccgtaggggccgggagatactgctcggaccagccgatggaatggtctccaaggggtggaggttgctggcgcccatcacggcgtacgcccagcagacaaggggcctcttaggatgcataatcaccagcctgaccggcgggacaaaaaccaagtggagggtgaagtccagattgtgtcaactgctgcccaaactttcctcgcaacgtgcatcagtggggtatgctggactgtctaccacggggccggaacgaggactattgcatatccaaaggccctgttatccagatgtataccaatgtggacaaagaccttgtgggctggcccgcccctcaaggtgcccgctcattgacgccctgcacctgcggctcctcggacctttacctggtcacgaggcatgccgatgtatccccgtgcgccggcggggtgatagcaggggcagcctgctttcgccccggcccatttcctatttgaaaggttcctcggggggcccgctgttgtgccccgcgggacacgccgtaggcatattcagggcgcggtgtgcacccgtggagtggctaaggcggtggactttatccccgtggagaacctagagacaaccatgaggtccccggtgtttacggacaactcctctccgccagcagtgccccagagcttccaggtggcccacctgcagctcccacgggcagcggcaagagcaccaaggtcccagctgcatatgcggctcagggctataaagtgctagtgctcaacccctctgttgctgcaacactgggctttggtgcttatatgtccaaggccccgggattgatcctaacatcaggaccggggcgagaacaattaccactggcagccccatcacgtactccacctacggcaagttccttgctgacggcgggtgctcggggggcgcctatgatataataatttgtgacgagtgccatccacggatgccacatccatcttgggcatcggcactgtccttgaccaggcagagaccgcgggggcgagactagttgtgctcgccaccgccacccctccgggctccatcactgtgccccatcctaacacgaggaggttgctctgtccaccaccggagagattcctttctatggcaaggctatccccctcgaagtaatcaaaggggggagacatctcattttttgtcactcaaagaagaagtgcgatgagctcgccgcaaagctggtcgcttgggcatcaatgccgtggcctactaccgcggtcttgacgtgtccgtcatcccgaccagcggcgatgttgtcgtcgtggcaactgatgctctcatgaccggttttaccggcgacttcgactcggtgaagactgcaacacgtgtgtcacccagacggtcgatttcagccttgaccctaccttcaccattgagacaaccacgcttccccaagatgctgtctcccgcactcagcgtcggggcaggactggcagggggaagccaggcatctaaggtttgtggcaccaggggagcgcccttccggcatgttcgactcgtccatcctctgtgagtgctatgacgcgggttgtgcttggtatgagctcacacccgccgagactacagttagactgcgagcgtcatgaacaccccggggcttcccgtgtgccaagaccatctcgaattttgggagggggtcttcacaggcctcactcatatagatgcccacttcctatcccagacaaagcagagtggggagaatcttccttacctggtagcgtacaagccaccgtgtgcgctagggctcaagcccctcccccatcgtgggaccagatgtggaagtgtttgatccgcctcaaacccacccttcatgggccaacacctctgctatacagactgggtgctgtccgaatgaggtcaccctgacgcacccagtcaccaaatatatcatga

SEQ ID NO: 76 - DNA, 4853 bp, Hepatitis C virus; identical to SEQ ID NO: 34

SEQ ID NO: 77 - DNA, 4853 bp, Hepatitis C virus
tcgcccacaggacgttaagttcccgggtggcggtcagatcgttggtggagtttacttgttgccgcgcaggggccctagaatgggtgtgcgcgcgccgaggaacacttccgagcggtcgcaacctcgagtagacgtcagcctatccccaaggcacgtcggcccgagggcaggacctgggctcagcccgggtacccttggcccctctatggcaatgagggctgcgggtgggcgggatggctcctgtctccccgcggtctcggcctagttggggccccacagacccccggcgtaggtcgcgcaatttgggtaaggtcatcgatacccttacgtgcggcttcgccgacctcatggggtacataccgctcgtcggcgcccctcttggaggcgctgccaggccctggcgcatggcgtccgggtcctggaagacggcgtgaactatgcaacagggaaccttcctggttgctctttctctatcttccttctggccctgctctcttgtctgactgtgcccgcttcggcctacaagtgcgcaactccacggggctctatcacgtcaccaatgattgccctaactcgagtattgtgtacgaggcgcctgatgccatcctgcacactccggggtgtgtcccttgcgttcgcgagggtaatgcctcgaggtgttggtggcgatgacccccacggtggccaccagggacggcaaactccctgcgacgcagctccgacgtcacatcgatctgcttgtcgggagcgccaccctctgttcggccctctacgtgggggacctgtgcggtctgtctttcttgttggtcaactgtttaccttctctcccaggcgccactggacgacgcaagactgcaattgttctatctatcccggccatataacgggccaccgcatggcatgggatatgatgatgaactggtccccgacgcagcgttggtaatggctcagctgctccggatcccgcaagccatcttggacatgatcgctggtgctcactggggagtcctggcgggcatagcgtatttctccatggtggggaactgggcgaaggtcctgtagtgctgttgctattcgccggcgtcgatgcggaaaccgtcgtcaccggggggaccgccgctcgcaacgcgtacggactctctagtctcttcatgcggggccccaagcagaacatccagctgatcaacaccaacggcagtggcacatcaataggacggccttgaactgcaacgatagccttaacaccggctggctagcagggcttttctatcagcacaacttcaactcttcaggctgtcctgagaggctggccagctgccgacgcctgccgattttgcccagggctggggccctatcagccatgccaacggcagcggccccgaccaccgcccctactgctggcactaccccccaaaaccttgcggtattgtgcccgcacagaacgtgtgtggtccggtatattgcttcctcccagccccgtggcggtgggaacgaccgacaggtcgggcgtccctacctaccgctggggtgaaaatgagacggacgtcttcgtccttaacaacaccaggccaccgctgggcaattggtttggttgacctggatgaactcaactggattcaccaaagtgtgcggagcgcctccttgtgtcatcggaggggcgggcaacaacaccttgcactgccccaccgattgtttccgcaagcatccggaagccacatactcccggtgcggctccgtccctggattacacccagatgcatggtcgactacccgtataggctttggcattatccttgtaccatcaactataccatatttaaagtcaggatgtacgtgggaggggtcgagcataggctggatgtgcctgcaactggacgcggggcgaacgctgcgatctggaagacagggacaggtccgagctcagcccgttgctgctgtccaccacacagtggcaggtccttccgtgttccttcacgaccttgccggccttgtccaccggcctctccacctccaccagaacatcgtggacgtacagtacctgtacggggtggggtcaagcattgcgtcctgggccattaagtgggagtacgtcgttctcctgttccttctgcttgcagacgcgcgcgtctgtcctgcctgtggatgatgctactcatatcccaagcggaggcggctttggagaacctcgtaacactcaatgcagcatccctggccgggacgcaaggtcttgtatccttcctcgtgttcttctgtttcgcgtggtatctgaaggtaggtgggtgccaggagcggtttacgccctctacgggatgtggcctctcctcctgctcctgttggcgttgccccagcgggcatacgcgctggacacggaggtggccgcgtcgtgtggcggcgttgtctcgtcgggttgatggcgctgactctgtcaccgtattacaagcgctacatcagctggtgcttatggtggctccagtattttctgactagagcagaagcgcaactgcacgtatgggttccccccctcaacgctcgagggggggcgacgctgtcatcttactcatgtgtgttgtacacccgactttggtatttgacatcaccaaactactgctggccgtcctcggacccctttggattcttcaagccagtctgcttaaagtaccctacttgtgcgcgtccagggccttctccggatctgcgcgttagcgcggaagatggttgggggccactacgtgcaaatggttatcatcaagctagggacgcttactggcacctatgtttacaaccatctcactcctcttcgggactggcgcacaacggcctgcgagatctggccgtggctgtagagccagtcgtcttctcccaaatggagaccaagctcatcacatggggggcagacactgccgcgtgcggtgacatcatcaacggcttgcccgttccgcccgtaggggccgggagatactgctcggaccagccgatggaatggtctccaaggggtggaggttgctggcgcccatcacggcgtacgcccagcagacaaggggcctcttaggatgcataatcaccagcctgaccggcgggacaaaaaccaagtggagggtgaagtccagattgtgtcaactgctgcccaaactttcctcgcaacgtgcatcagtggggtatgctggactgtctaccacggggccggaacgaggactattgcatctccaaaggccctgttatccagatgtataccaatgtggacaaagaccttgtgggctggcccgcccctcaaggtgcccgctcattgacgccctgcacctgcggctcctcggacctttacctggtcacgaggcatgccgatgtctccccgtgcgccggcggggtgatagcaggggcagcctgctttcgccccggcccatttcctatttgaaaggttcctcggggggcccgctgttgtgccccgcgggacacgccgtaggcatattcagggcgcggtgtgcacccgtggagtggctaaggcggtggactttatccccgtggagaacctagagacaaccatgaggtccccggtgtttacggacaactcctctccgccagcagtgccccagagcttccaggtggcccacctgcatctcccacgggcagcggcaagagcaccaaggtcccagctgcatatgcggctcagggctataaagtgctagtgctcaacccctctgttgctgcaacactgggctttggtgcttatatgtccaaggcccagggattgatcctaacatcaggaccggggcgagaacaattaccactggcagccccatcacgtactccacctacggcaagttccttgccgacggcgggtgctcggggggcgcctatgatataataatttgtgacgagtgccacccacggatgccacatccatcttgggcatcggcactgtccttgaccaggcagagaccgcgggggcgagactagttgtgctcgccaccgccacccctccgggctccatcactgtgccccatcctaacatgaggaggttgctctgtccaccaccggagagattcctttctatggcaaggctatccccctcgaagtaatcaaaggggggagacatctcattttttgtcactcaaagaagaagtgcgatgagctcgccgcaaagctggtcgcatgggcatcaatgccgtggcctactaccgcggtcttgacgtgtccgtcatcccgaccagcggcgatgttgtcgtcgtggcaactgatgctctcatgaccggttttaccggcgacttcgactcggtgatgactgcaacacgtgtgtcacccagacggtcgatttcagccttgaccctaccttcaccattgagacaaccacgcttccccaagatgctgtctcccgcactcagcgtcggggcaggactggcagggggaagccaggcatctacggtttgtggcaccaggggagcgcccttccggcatgttcgactcgtccatcctctgtgagtgctatgacgcgggttgtgcttggtatgagctcacacccgccgagactacagttagactacgagcgtaatgaacaccccggggcttcccgtgtgccaagaccatctcgaattttgggagggggtcttcacaggcctcactcatatagatgcccacttcctatcccagacaaagcagagtggggagaatcttccttacctggtagcgtacaagccaccgtgtgcgctagggctcaagcccctcccccatcgtgggaccagatgtggaagtgtttgatccgcctcaaacccacccttcatgggccaacacctctgctatacagactgggtgctgtccaaatgaggtcaccctgacgcacccagtcaccaaatatatcatga

SEQ ID NO: 78 - DNA, 4853 bp, Hepatitis C virus; identical to SEQ ID NO: 34

SEQ ID NO: 79 - DNA, 4853 bp, Hepatitis C virus; identical to SEQ ID NO: 49

SEQ ID NO: 80 - DNA, 4853 bp, Hepatitis C virus
tcgcccacaggacgttaagttcccgggtggcggtcagatcgttggtggagtttacttgttgccgcgcaggggccctagaatgggtgtgcgcgcgccgaggaagacttccgagcggtcgcaacctcgagtagacgtcagcctatccccaaggcacgtcggcccgagggcaggacctgggctcagcccgggtacccttggcccctctatggcaatgagggctgcgggtgggcgggatggctcctttccccccgcggtctcggcctagttggggccccacagacccccggcgtaggtcgcgcaatttgggtaaggtcatcgacacccttacgtgcggcttcgccgacctcatggggtacataccgctcgtcggcgcccctcttggaggcgctgccaggccctggcgcatggcgttcgggttctggaagacggcgtgaactatgcaacagggaaccttcctggttgctctttctctatcttctttctggccctgctctcttgtctgactgtgcccgcttcggcctacaagtgcgcaactctacagggctctaccacgtcaccaatgattgccctaactcgagtattgtgtacgaggcgcctgatgccatcctgcacactccggggtgtgtcccttgcgttcgcgagggtaacgcctcgaggtgttggtggcgatgacccccacggtggccaccagggacggcaaactccccgcgacgcagcttcgacgtcacatcgatctgcttgtcgggagcgccaccctctgttcggctctttacgtgggggacctgtgcggtctgtctttcttgtgggtcaactgtttaccttctcccccaggcgccactggacgacgcaagactgcaattgctctatctatcccggccatataacgggtcaccgcatggcatgggatatgatgatgaactggtccccgacgcggcgttggtaatggctcagctgctccggatcccgcaagccatcttggacatgatcgctggtgcccactggggagtcttggcgggcatagcgtatttctccatggtggggaactgggcgaaggtcctgtagtgctgctgctattcgccggcgtcgacgcggaaaccatgaccaccgggggggccgccgctcgcaacgtgtatagaatttccagcttcttctcgccgggcccccagcagaacatccagctgatcaacaccaacggcagtggcacatcaataggacggccttgaactgcaacgacagccttaacaccggctggttagcagggcttttctatcatcgcagcttcaactcttcaggctgtcctgcgaggctggccagctgccgacgcctaccgactttgcccagggctggggccctatcagccatgccaacggcagcggccccgaccaacgcccctactgttggcactaccccccaaaaccttgcggtattgtgcccgcacggaacgtgtgtggcccggtatattgcttccccccagtcccgtggcggtgggaacgaccgacagggcgggcgtccctacctaccgctggggtgaaaatgaaacggacgtcttcgtccttaacaacaccaggccaccgctgggcaattggttcggttgacctggatgaattcaactggattcaccaaagtgtgcggagcgcctccttgtgtcatcggaggagtgggcaacgacaccttgtactgccccactgattgtttccgcaagcatccggaagccacatattcccggtgcggctccgtccctggattacacccagatgcctggttgactacccgtataggctttggcattatccttgtaccgtcaactacaccatattcaaagtcaggatgtatgtgggaggggtcgagcataggctggatgcgcctgcaactggacgcggggcgaacgttgcgatctggaagacagggacaggtccgagctcagcccgttgctgctgtccactacacagtggcaggtccttccgtgctccttcacgaccttgccagccttgtccaccggcctctccacctccaccagaacattgtggacgtgcagtacctgtacggggtagggtcaagcatcgcgtcctgggccattaagtgggagtacgtcgttctcctgttccttctgcttgcagacgcgcgcgtctgtcctgcctgtggatgatgctactcatatcccaagcggaggcggctttggagaacctcgtaatactcaatgcagcatccctggccgggacgcaaggtcttgtatccttcctcgtgttcttctgctttgcgtggtatctgaaggtaggtgggtgccaggagcggtttacgccctctacggaatgtggcctctcctcctgctcctgttggcgttgccccagcgggcatacgcgctggacacggaggtggccgcgtcgtgtggcggcgttgtcttgtcgggttgatgatgctgactctgtcaccgtattacaagcgctatatcagctggtgcttatggtggcttcagtattttctgactagggcagaagcgcaactgcacgtgtgggttccccccctcaacgttcgagggggggcgacgctgccatcttactcacatgcgttgtacacccgactctggtatttgacatcaccaaactactgctggctgtcctcggacccctttggattcttcaagccagtttgcttaaagtgccctacttgtgcgcgtccaaggccttctccggatctgcgcgttagcgcggaagatggtcggaggccactacgtgcaaatggttatcatcaagttagggatgcttactggcacctatgtttataaccatctcacccccctccgggactggcgcacaacggcctgcgagatctggccgtggctgtagaaccagtcgtcttctcccgaatggagaccaagctcatcacgtggggggcagacactgccgcgtgcggtgacatcatcaacggcttgcccgttccgcccgtaggggccaggagatactgctcggaccagccgatggaatggtctccaaggggtggaggttgctggcgcccatcacggcgtacgcccagcagacaaggggcctcctagggtgcataatcaccagcctaaccggcgggataaaaaccaagtggagggtgaggtccagattgtgtcaactgctgcccaaactttcctggcaacgtgcatcagtggggtatgctggactgtctaccacggggccggaacgaggactattgcatctccaaaggccctgttatccagatgtataccaatgtggacaaagaccttgtgggctggcccgctcctcaaggtgcccgctcattgacaccctgcacctgcggctcctcggacctttacctggtcacgaggcatgccgatgtctccccgtgcgccggcggggtgatagcaggggcagcctgctctcgccccggcccatttcctatctgaaaggctcctcggggggcccgctgttgtgccccgcgggacacgccgtaggcatattcagggcgcggtgtgcacccgtggagtggctaaggcggtggactttatccctgtggagaacctagagacaaccatgaggtccccggtgttcacggacaactcctctccgccagcagtgccccagagcttccaggtggcccacctgcatctcccacaggcagcggcaagagcaccaaggtcccggctgcgtatgcggctcagggctataaggtgctagtactcaacccctctgtcgctgcaacactgggctttggtgcttatatgtccaaggcccagggatcgatcctaatatcaggaccggggcgagaacaattaccactggcagccccatcacgtactccacctacggcaaatttcttgccgacggcgggtgctcggggggcgcttatgatataataatttgtgacgagtgccatccacggatgccacatccatcttgggcatcggcactgtccttgaccaggcagagaccgcgggggcgagactggttgtgctcgccaccgccacccctccgggctccgtcactgtgccccatcctaacatgaggaggttgctctgtccaccaccggagagattcctttctatggcaaggctatccccctcgaagtaatcaaaggggggagacatctcattttttgtcactcaaagaagaagtgcgacgagctcgccgcaaagctagtcgcatgggcatcaatgccgtggcctactaccgcggtcttgacgtgtccgtcatcccgaccagcggcgatgttgtcgtcgtggcaactgatgctctcatgaccggctttaccggcgacttcgactcggtgatgactgcaacacgtgtgtcacccagacggtcgacttcagccttgaccctactttcaccattgagacaaccacgcttccccaggatgctgtctcccgcactcaacgtcggggtaggactggcagggggaagccaggcatctacgatttgtggcaccgggggagcgcccctccggcatgttcgactcgtccatcctctgtgagtgctatgacgcgggctgtgcttggtatgagctcacgcccgccgagactacagttagactacgagcgtaatgaacaccccggggcttcccgtgtgccaagaccatcttgaattttgggagggcgtcttcacaggcctcactcatatagatgcccacttcctatcccaaacaaagcagagtggggagaatcttccttacctggtagcgtacaagccaccgtgtgcgctagggctcaagcccctcccccatcgtgggaccagatgtggaagtgtttgatccgcctcaaacccaccctccatgggccaacacctctgctatacagactgggcgctgtccaaatgaggtcaccctgacgcacccagtcaccaaatacattatga

SEQ ID NO: 81 - DNA, 4853 bp, Hepatitis C virus
tcgcccacaggacgttaagttcccgggtggcggtcagatcgttggtggagtttacttgttgccgcgcaggggccctagaatgggtgtgcgcgcgccgaggaagacttccgagcggtcgcaacctcgagtagacgtcagcctatccccaaggcacgtcggcccgagggcaggacctgggctcagcccgggtacccttggcccctctatggcaatgagggctgcgggtgggcgggatggctcctgtccccccgcggtctcggcctagttggggccccacagacccccggcgtaggtcgcgcaatttgggtaaggtcatcgacacccttacgtgcggcttcgccgacctcatggggtacataccgctcgtcggcgcccctcttggaggcgctgccaggccctggcgcatggcgttcgggttctggaagacggcgtgaactatgcaacagggaaccttcctggttgctctttctctatcttctttctggccctgctctcttgtctgactgtgcccgcttcggcctacaagtgcgcaactctacagggctctaccacgtcaccaatgattgccctaactcgagtattgtgtacgaggcgcctgatgccatcctgcacactccggggtgtgtcccttgcgttcgcgagggtaacgcctcgaggtgttggtggcgatgacccccacggtggccaccagggacggcaaactccccgcgacgcagcttcgacgtcacatcgatctgcttgtcgggagcgccaccctctgttcggctctttacgtgggggacctgtgcggtctgtctttcttgtgggtcaactgtttaccttctcccccaggcgccactggacgacgcaagactgcaattgctctatctatcccggccatataacgggtcaccgcatggcatgggatatgatgatgaactggtccccgacgcggcgttggtaatggctcagctgctccggatcccgcaagccatcttggacatgatcgctggtgcccactggggagtcttggcgggcatagcgtatttctccatggtggggaactgggcgaaggtcctgtagtgctgctgctattcgccggcgtcgacgcggaaaccatgaccaccgggggggccgccgctcgcaacgtgtatagaatttccagcttcttctcgccgggcccccagcagaacatccagctgatcaacaccaacggcagtggcacatcaataggacggccttgaactgcaacgacagccttaacaccggctggttagcagggcttttctatcatcgcagcttcaactcttcaggctgtcctgcgaggctggccagctgccgacgcctaccgactttgcccagggctggggccctatcagccatgccaacggcagcggccccgaccaacgcccctactgttggcactaccccccaaaaccttgcggtattgtgcccgcacggaacgtgtgtggcccggtatattgcttccccccagtcccgtggcggtgggaacgaccgacagggcgggcgtccctacctaccgctggggtgaaaatgaaacggacgtcttcgtccttaacaacaccaggccaccgctgggcaattggttcggttgacctggatgaattcaactggattcaccaaagtgtgcggagcgcctccttgtgtcatcggaggagtgggcaacgacaccttgtactgccccactgattgtttccgcaagcatccggaagccacatattcccggtgcggctccgtccctggattacacccagatgcctggttgactacccgtataggctttggcattatccttgtaccgtcaactacaccatattcaaagtcagggtgtatgtgggaggggtcgagcataggctggatgcgcctgcaactggacgcggggcgaacgttgcgatctggaagacagggacaggtccgagctcagcccgttgctgctgtccactacacagtggcaggtccttccgtgctccttcacgaccttgccagccttgtccaccggcctctccacctccaccagaacattgtggacgtgcagtacctgtacggggtagggtcaagcatcgcgtcctgggccattaagtgggagtacgtcgttctcctgttccttctgcttgcagacgcgcgcgtctgtcctgcctgtggatgatgctactcatatcccaagcggaggcggctttggagaacctcgtaatactcaatgcagcatccctggccgggacgcaaggtcttgtatccttcctcgtgttcttctgctttgcgtggtatctgaaggtaggtgggtgccaggagcggtttacgccctctacggaatgtggcctctcctcctgctcctgttggcgttgccccagcgggcatacgcgctggacacggaggtggccgcgtcgtgtggcggcgttgtcttgtcgggttgatgatgctgactctgtcaccgtattacaagcgctatatcagctggtgcttatggtggcttcagtattttctgactagggcagaagcgcaactgcacgtgtgggttccccccctcaacgttcgagggggggcgacgctgccatcttactcacatgcgttgtacacccgactctggtatttgacatcaccaaactactgctggctgtcctcggacccctttggattcttcaagccagtttgcttaaagtaccctacttgtgcgcgtccaaggccttctccggatctgcgcgttagcgcggaagatggtcggaggccactacgtgcaaatggttatcatcaagttagggatgcttactggcacctatgtttataaccatctcacccccctccgggactggcgcacaacggcctgcgagatctggccgtggctgtagaaccagtcgtcttctcccaaatggagaccaagctcatcacgtggggggcagacactgccgcgtgcggtgacatcatcaacggcttgcccgttccgcccgtaggggccaggagatactgctcggaccagccgatggaatggtctccaaggggtggaggttgctggcgcccatcacggcgtacgcccagcagacaaggggcctcctagggtgcataatcaccagcctaaccggcgggataaaaaccaagtggagggtgaggtccagattgtgtcaactgctgcccaaactttcctggcaacgtgcatcagtggggtatgctggactgtctaccacggggccggaacgaggactattgcatctccaaaggccctgttatccagatgtataccaatgtggacaaagaccttgtgggctggcccgctcctcaaggtgcccgctcattgacaccctgcacctgcggctcctcggacctttacctggtcacgaggcatgccgatgtctccccgtgcgccggcggggtgatagcaggggcagcctgctctcgccccggcccatttcctatctgaaaggctcctcggggggcccgctgttgtgccccgcgggacacgccgtaggcatattcagggcgcggtgtgcacccgtggagtggctaaggcggtggactttatccctgtggagaacctagagacaaccatgaggtccccggtgttcacggacaactcctctccgccagcagtgccccagagcttccaggtggcccacctgcatctcccacaggcagcggcaagagcaccaaggtcccggctgcgtatgcggctcagggctataaggtgctagtactcaacccctctgtcgctgcaacactgggctttggtgcttatatgtccaaggcccagggatcgatcctaatatcaggaccggggcgagaacaattaccactggcagccccatcacgtactccacctacggcaaatttcttgccgacggcgggtgctcggggggcgcttatgatataataatttgtgacgagtgccatccacggatgccacatccatcttgggcatcggcactgtccttgaccaggcagagaccgcgggggcgagactggttgtgctcgccaccgccacccctccgggctccgtcactgtgccccatcctaacatgaggaggttgctctgtccaccaccggagagattcccttctatggcaaggctatccccctcgaagtaatcaaaggggggagacatctcattttttgtcactcaaagaagaagtgcgacgagctcgccgcaaagctagtcgcatgggcatcaatgccgtggcctactaccgcggtcttgacgtgtccgtcatcccgaccagcggcgatgttgtcgtcgtggcaactgatgctctcatgaccggctttaccggcgacttcgactcggtgatgactgcaacacgtgtgtcacccagacggtcgacttcagccttgaccctactttcaccattgagacaaccacgcttccccaggatgctgtctcccgcactcaacgtcggggtaggactggcagggggaagccaggcatctacgatttgtggcaccgggggagcgcccctccggcatgttcgactcgtccatcctctgtgagtgctatgacgcgggctgtgcttggtatgagctcacgcccgccgagactacagttagactacgagcgtaatgaacaccccggggcttcccgtgtgccaagaccatcttgaattttgggagggcgtcttcacaggcctcactcatatagatgcccacttcctatcccaaacaaagcagagtggggagaatcttccttacctggtagcgtacaagccaccgtgtgcgctagggctcaagcccctcccccatcgtgggaccagatgtggaagtgtttgatccgcctcaaacccaccctccatgggccaacacctctgctatacagactgggcgctgtccaaatgaggtcaccctgacgcacccagtcaccaaatacattatga

SEQ ID NO: 82 - DNA, 4853 bp, Hepatitis C virus
tcgcccacaggacgttaagttcccgggtggcggtcagatcgttggtggagtttacttgttgccgcgcaggggccctagaatgggtgtgcgcgcgccgaggaagacttccgagcggtcgcaacctcgagtagacgtcagcctatccccaaggcacgtcggcccgagggcaggacctgggctcagcccgggtacccttggcccctctatggcaatgagggctgcgggtgggcgggatggctcctgtctccccgcggtctcggcctagttggggccccacagacccccggcgtaggtcgcgcaatttgggtaaggtcatcgatacccttacgtgcggcttcgccgacctcatggggtacataccgctcgtcggcgcccctcttggaggcgctgccaggccctggcgcatggcgtccgggtcctggaagacggcgtgaactatgcaacagggaaccttcctggttgctctttctctatcttccttctggccctgctctcttgtctgactgtgcccgcttcggcctacaagtgcgcaactccacggggctctatcacgtcaccaatgattgccctaactcgagtattgtgtacgaggcgcctgatgccatcctgcacactccggggtgtgtcccttgcgttcgcgagggtaatgcctcgaggtgttggtggcgatgacccccacggtggccaccagggacggcaaactccctgcgacgcagctccgacgtcacatcgatctgcttgtcgggagcgccaccctctgttcggccctctacgtgggggacctgtgcggtctgtctttcttgttggtcaactgtttaccttctctcccaggcgccactggacgacgcaagactgcaattgttctatctatcccggccatataacgggccaccgcatggcatgggatatgatgatgaactggtccccgacgcagcgttggtaatggctcagctgctccggatcccgcaagccatcttggacatgatcgctggtgctcactggggagtcctggcgggcatagcgtatttctccatggtggggaactgggcgaaggtcctgtagtgctgttgctattcgccggcgtcgatgcggaaaccgtcgtcaccggggggaccgccgcccgcaacgcgtacggactctctagtctcttcatgcggggccccaagcagaacatccagctgatcaacaccaacggcagtggcacatcaataggacggccttgaactgcaacgatagccttaacaccggctggctagcagggcttttctatcagcacaacttcaactcttcaggctgtcctgagaggctggccagctgccgacgcctgccgattttgcccagggctggggccctatcagccatgccaacggcagcggccccgaccaccgcccctactgctggcactaccccccaaaaccttgcggtattgtgcccgcacagaacgtgtgtggtccggtatattgcttcctcccagccccgtggcggtgggaacgaccgacaggtcgggcgtccctacctaccgctggggtgaaaatgagacggacgtcttcgtccttaacaacaccaggccaccgctgggcaattggtttggttgacctggatgaactcaactggattcaccaaagtgtgcggagcgcctccttgtgtcatcggaggggcgggcaacaacaccttgcactgccccaccgattgtttccgcaagcatccggaagccacatactcccggtgcggctccgtccctggattacacccagatgcatggtcgactacccgtataggctttggcattatccttgtaccatcaattataccatatttaaagtcaggatgtacgtgggaggggtcgagcataggctggatgtgcctgcaactggacgcggggcgaacgctgcgatctggaagacagggacaggtccgagctcagcccgttgctgctgtccaccacacagtggcaggtccttccgtgttccttcacgaccttgccggccttgtccaccggcctctccacctccaccagaacatcgtggacgtacagtacctgtacggggtggggtcaagcattgcgtcctgggccattaagtgggagtacgtcgttctcctgttccttctgcttgcagacgcgcgcgtctgtcctgcctgtggatgatgctactcatatcccaagcggaggcggctttggagaacctcgtaacactcaatgcagcatccctggccgggacgcaaggtcttgtatccttcctcgtgttcttctgtttcgcgtggtatctgaaggtaggtgggtgccaggagcggtttacgccctctacgggatgtggcctctcctcctgctcctgttggcgttgccccagcgggcatacgcgctggacacggaggtggccgcgtcgtgtggcggcgttgtctcgtcgggttgatggcgctgactctgtcaccgtattacaagcgctacatcagctggtgcttatggtggctccagtattttctgactagagcagaagcgcaactgcacgtatgggttccccccctcaacgctcgagggggggcgacgctgtcatcttactcatgtgtgttgtacacccgactttggtatttgacatcaccaaactactgctggccgtcctcggacccctttggattcttcaagccagtctgcttaaagtaccctacttgtgcgcgtccagggccttctccggatctgcgcgttagcgcggaagatggttgggggccactacgtgcaaatggttatcatcaagctagggacgcttactggcacctatgtttacaaccatctcactcctcttcgggactggcgcacaacggcctgcgagatctggccgtggctgtagagccagtcgtcttctcccaaatggagaccaagctcatcacatggggggcagacactgccgcgtgcggtgacatcatcaacggcttgcccgttccgcccgtaggggccgggagatactgctcggaccagccgatggaatggtctccaaggggtggaggttgctggcgcccatcacggcgtacgcccagcagacaaggggcctcttaggatgcataatcaccagcctgaccggcgggacaaaaaccaagtggagggtgaagtccagattgtgtcaactgctgcccaaactttcctcgcaacgtgcatcagtggggtatgctggactgtctaccacggggccggaacgaggactattgcatctccaaaggccctgttatccagatgtataccaatgtggacaaagaccttgtgggctggcccgcccctcaaggtgcccgctcattgacgccctgcacctgcggctcctcggacctttacctggtcacgaggcatgccgatgtctccccgtgcgccggcggggtgatagcaggggcagcctgctttcgccccggcccatttcctatttgaaaggttcctcggggggcccgctgttgtgccccgcgggacacgccgtaggcatattcagggcgcggtgtgcacccgtggagtggctaaggcggtggactttatccccgtggagaacctagagacaaccatgaggtccccggtgtttacggacaactcctctccgccagcagtgccccagagcttccaggtggcccacctgcatctcccacgggcagcggcaagagcaccaaggtcccagctgcatatgcggctcagggctataaagtgctagtgctcaacccctctgttgctgcaacactgggctttggtgcttatatgtccaaggcccagggattgatcctaacatcaggaccggggcgagaacaattaccactggcagccccatcacgtactccacctacggcaagttccttgccgacggcgggtgctcggggggcgcctatgatataataatttgtgacgagtgccacccacggatgccacatccatcttgggcatcggcactgtccttgaccaggcagagaccgcgggggcgagactagttgtgctcgccaccgccacccctccgggctccatcactgtgccccatcctaacatgaggaggttgctctgtccaccaccggagagattcctttctatggcaaggctatccccctcgaagtaatcaaaggggggagacatctcattttttgtcactcaaagaagaagtgcgatgagctcgccgcaaagctggtcgcatgggcatcaatgccgtggcctactaccgcggtcttgacgtgtccgtcatcccgaccagcggcgatgttgtcgtcgtggcaactgatgctctcatgaccggttttaccggcgacttcgactcggtgatgactgcaacacgtgtgtcacccagacggtcgatttcagccttgaccctaccttcaccattgagacaaccacgcttccccaagatgctgtctcccgcactcagcgtcggggcaggactggcagggggaagccaggcatctacggtttgtggcaccaggggagcgcccttccggcatgttcgactcgtccatcctctgtgagtgctatgacgcgggttgtgcttggtatgagctcacacccgccgagactacagttagactacgagcgtaatgaacaccccggggcttcccgtgtgccaagaccatctcgaattttgggagggggtcttcacaggcctcactcatatagatgcccacttcctatcccagacaaagcagagtggggagaatcttccttacctggtagcgtacaagccaccgtgtgcgctagggctcaagcccctcccccatcgtgggaccagatgtggaagtgtttgatccgcctcaaacccacccttcatgggccaacacctctgctatacagactgggtgctgtccaaatgaggtcaccctgacgcacccagtcaccaaatatatcatga

SEQ ID NO: 83 - DNA, 4853 bp, Hepatitis C virus
tcgcccacaggacgttaagttcccgggtggcggtcagatcgttggtggagtttacttgttgccgcgcaggggccctagaatgggtgtgcgcgcgccgaggaagacttccgagcggtcgcaacctcgagtagacgtcagcctatccccaaggcacgtcggcccgagggcaggacctgggctcagcccgggtacccttggcccctctatggcaatgagggctgcgggtgggcgggatggctcctgtccccccgcggtctcggcctagttggggccccacagacccccggcgtaggtcgcgcaatttgggtaaggtcatcgacacccttacgtgcggcttcgccgacctcatggggtacataccgctcgtcggcgcccctcttggaggcgctgccaggccctggcgcatggcgttcgggttctggaagacggcgtgaactatgcaacagggaaccttcctggttgctctttctctatcttctttctggccctgctctcttgtctgactgtgcccgcttcggcctacaagtgcgcaactctacagggctctaccacgtcaccaatgattgccctaactcgagtattgtgtacgaggcgcctgatgccatcctgcacactccggggtgtgtcccttgcgttcgcgagggtaacgcctcgaggtgttggtggcgatgacccccacggtggccaccagggacggcaaactccccgcgacgcagcttcgacgtcacatcgatctgcttgtcgggagcgccaccctctgttcggctctttacgtgggggacctgtgcggtctgtctttcttgtgggtcaactgtttaccttctcccccaggcgccactggacgacgcaagactgcaattgctctatctatcccggccatataacgggtcaccgcatggcatgggatatgatgatgaactggtccccgacgcggcgttggtaatggctcagctgctccggatcccgcaagccatcttggacatgatcgctggtgcccactggggagtcttggcgggcatagcgtatttctccatggtggggaactgggcgaaggtcctgtagtgctgctgctattcgccggcgtcgacgcggaaaccatgaccaccgggggggccgccgctcgcaacgtgtatagaatttccagcttcttctcgccgggcccccagcagaacatccagctgatcaacaccaacggcagtggcacatcaataggacggccttgaactgcaacgacagccttaacaccggctggttagcagggcttttctatcatcgcagcttcaactcttcaggctgtcctgcgaggctggccagctgccgacgcctaccgactttgcccagggctggggccctatcagccatgccaacggcagcggccccgaccaacgcccctactgttggcactaccccccaaaaccttgcggtattgtgcccgcacggaacgtgtgtggcccggtatattgcttccccccagtcccgtggcggtgggaacgaccgacagggcgggcgtccctacctaccgctggggtgaaaatgaaacggacgtcttcgtccttaacaacaccaggccaccgctgggcaattggttcggttgacctggatgaattcaactggattcaccaaagtgtgcggagcgcctccttgtgtcatcggaggagtgggcaacgacaccttgtactgccccactgattgtttccgcaagcatccggaagccacatattcccggtgcggctccgtccctggattacacccagatgcctggttgactacccgtataggctttggcattatccttgtaccgtcaactacaccatattcaaagtcaggatgtatgtgggaggggtcgagcataggctggatgcgcctgcaactggacgcggggcgaacgttgcgatctggaagacagggacaggtccgagctcagcccgttgctgctgtccactacacagtggcaggtccttccgtgctccttcacgaccttgccagccttgtccaccggcctctccacctccaccagaacattgtggacgtgcagtacctgtacggggtagggtcaagcatcgcgtcctgggccattaagtgggagtacgtcgttctcctgttccttctgcttgcagacgcgcgcgtctgtcctgcctgtggatgatgctactcatatcccaagcggaggcggctttggagaacctcgtaatactcaatgcagcatccctggccgggacgcaaggtcttgtatccttcctcgtgttcttctgctttgcgtggtatctgaaggtaggtgggtgccaggagcggtttacgccctctacggaatgtggcctctcctcctgctcctgttggcgttgccccagcgggcatacgcgctggacacggaggtggccgcgtcgtgtggcggcgttgtcttgtcgggttgatgatgctgactctgtcaccgtattacaagcgctatatcagctggtgcttatggtggcttcagtattttctgactagggcagaagcgcaactgcacgtgtgggttccccccctcaacgttcgagggggggcgacgctgccatcttactcacatgcgttgtacacccgactctggtatttgacatcaccaacctactgctggctgtcctcggacccctttggattcttcaagccagtttgcttaaagtaccctacttgtgcgcgtccaaggccttctccggatctgcgcgttagcgcggaagatggtcggaggccactacgtgcaaatggttatcatcaagttagggatgcttactggcacctatgtttataaccatctcacccccctccgggactggcgcacaacggcctgcgagatctggccgtggctgtagaaccagtcgtcttctcccaaatggagaccaagctcatcacgtggggggcagacactgccgcgtgcggtgacatcatcaacggcttgcccgttccgcccgtaggggccaggagatactgctcggaccagccgatggaatggtctccaaggggtggaggttgctggcgcccatcacggcgtacgcccagcagacaaggggcctcctagggtgcataatcaccagcctaaccggcgggataaaaaccaagtggagggtgaggtccagattgtgtcaactgctgcccaaactttcctggcaacgtgcatcagtggggtatgctggactgtctaccacggggccggaacgaggactattgcatctccaaaggccctgttatccagatgtataccaatgtggacaaagaccttgtgggctggcccgctcctcaaggtgcccgctcattgacaccctgcacctgcggctcctcggacctttacctggtcacgaggcatgccgatgtctccccgtgcgccggcggggtgatagcaggggcagcctgctctcgccccggcccatttcctatctgaaaggctcctcggggggcccgctgttgtgccccgcgggacacgccgtaggcatattcagggcgcggtgtgcacccgtggagtggctaaggcggtggactttatccctgtggagaacctagagacaaccatgaggtccccggtgttcacggacaactcctctccgccagcagtgccccagagcttccaggtggcccacctgcatctcccacaggcagcggcaagagcaccaaggtcccggctgcgtatgcggctcagggctataaggtgctagtactcaacccctctgtcgctgcaacactgggctttggtgcttatatgtccaaggcccagggatcgatcctaatatcaggaccggggcgagaacaattaccactggcagccccatcacgtactccacctacggcaaatttcttgccgacggcgggtgctcggggggcgcttatgatataataatttgtgacgagtgccatccacggatgccacatccatcttgggcatcggcactgtccttgaccaggcagagaccgcgggggcgagactggttgtgctcgccaccgccacccctccgggctccgtcactgtgccccatcctaacatgaggaggttgctctgtccaccaccggagagattcctttctatggcaaggctatccccctcgaagtaatcaaaggggggagacatctcattttttgtcactcaaagaagaagtgcgacgagctcgccgcaaagctagtcgcatgggcatcaatgccgtggcctactaccgcggtcttgacgtgtccgtcatcccgaccagcggcgatgttgtcgtcgtggcaactgatgctctcatgaccggctttaccggcgacttcgactcggtgatgactgcaacacgtgtgtcacccagacggtcgacttcagccttgaccctactttcaccattgagacaaccacgcttccccaggatgctgtctcccgcactcaacgtcggggtaggactggcagggggaagccaggcatctacgatttgtggcaccgggggagcgcccctccggcatgttcgactcgtccatcctctgtgagtgctatgacgcgggctgtgcttggtatgagctcacgcccgccgagactacagttagactacgagcgtaatgaacaccccggggcttcccgtgtgccaagaccatcttgaattttgggagggcgtcttcacaggcctcactcatatagatgcccacttcctatcccaaacaaagcagagtggggagaatcttccttacctggtagcgtacaagccaccgtgtgcgctagggctcaagcccctcccccatcgtgggaccagatgtggaagtgtttgatccgcctcaaacccaccctccatgggccaacacctctgctatacagactgggcgctgtccaaatgaggtcaccctgacgcacccagtcaccaaatacattatga

SEQ ID NO: 84 - DNA, 4853 bp, Hepatitis C virus
tcgcccacaggacgttaagttcccgggtggcggtcagatcgttggtggagtttacttgttgccgcgcaggggccctagaatgggtgtgcgcgcgccgaggaagacttccgagcggtcgcaacctcgagtagacgtcagcctatccccaaggcacgtcggcccgagggcaggacctgggctcagcccgggtacccttggcccctctatggcaatgagggctgcgggtgggcgggatggctcctgtccccccgcggtctcggcctagttggggccccacagacccccggcgtaggtcgcgcaatttgggtaaggtcatcgacacccttacgtgcggcttcgccgacctcatggggtacataccgctcgtcggcgcccctcttggaggcgctgccaggccctggcgcatggcgttcgggttctggaagacggcgtgaactatgcaacagggaaccttcctggttgctctttctctatcttctttctggccctgctctcttgtctgactgtgcccgcttcggcctacaagtgcgcaactctacagggctctaccacgtcaccaatgattgccctaactcgagtattgtgtacgaggcgcctgatgccatcctgcacactccggggtgtgtcccttgcgttcgcgagggtaacgcctcgaggtgttggtggcgatgacccccacggtggccaccagggacggcaaactccccgcgacgcagcttcgacgtcacatcgatctgcttgtcgggagcgccaccctctgttcggctctttacgtgggggacctgtgcggtctgtctttcttgtgggtcaactgtttaccttctcccccaggcgccactggacgacgcaagactgcaattgctctatctatcccggccatataacgggtcaccgcatggcatgggatatgatgatgaactggtccccgacgcggcgttggtaatggctcagctgctccggatcccgcaagccatcttggacatgatcgctggtgcccactggggagtcttggcgggcatagcgtatttctccatggtggggaactgggcgaaggtcctgtagtgctgctgctattcgccggcgtcgacgcggaaaccatgaccaccgggggggccgccgctcgcaacgtgtatagaatttccagcttcttctcgccgggcccccagcagaacatccagctgatcaacaccaacggcagtggcacatcaataggacggccttgaactgcaacgacagccttaacaccggctggttagcagggcttttctatcatcgcagcttcaactcttcaggctgtcctgcgaggctggccagctgccgacgcctaccgactttgcccagggctggggccctatcagccatgccaacggcagcggccccgaccaacgcccctactgttggcactaccccccaaaaccttgcggtattgtgcccgcacggaacgtgtgtggcccggtatattgcttccccccagtcccgtggcggtgggaacgaccgacagggcgggcgtccctacctaccgctggggtgaaaatgaaacggacgtcttcgtccttaacaacaccaggccaccgctgggcaattggttcggttgacctggatgaattcaactggattcaccaaagtgtgcggagcgcctccttgtgtcatcggaggagtgggcaacgacaccttgtactgccccactgattgtttccgcaagcatccggaagccacatattcccggtgcggctccgtccctggattacacccagatgcctggttgactacccgtataggctttggcattatccttgtaccgtcaactacaccatattcaaagtcaggatgtatgtgggaggggtcgagcataggctggatgcgcctgcaactggacgcggggcgaacgttgcgatctggaagacagggacaggtccgagctcagcccgttgctgctgtccactacacagtggcaggtccttccgtgctccttcacgaccttgccagccttgtccaccggcctctccacctccaccagaacattgtggacgtgcagtacctgtacggggtagggtcaagcatcgcgtcctgggccattaagtgggagtacgtcgttctcctgttccttctgcttgcagacgcgcgcgtctgtcctgcctgtggatgatgctactcatatcccaagcggaggcggctttggagaacctcgtaatactcaatgcagcatccctggccgggacgcaaggtcttgtatccttcctcgtgttcttctgctttgcgtggtatctgaaggtaggtgggtgccaggagcggtttacgccctctacggaatgtggcctctcctcctgctcctgttggcgttgccccagcgggcatacgcgctggacacggaggtggccgcgtcgtgtggcggcgttgtcttgtcgggttgatgatgctgactctgtcaccgtattacaagcgctatatcagctggtgcttatggtggcttcagtattttctgactagggcagaagcgcaactgcacgtgtgggttccccccctcaacgttcgagggggggcgacgctgccatcttactcacatgcgttgtacacccgactctggtatttgacatcaccaaactactgctggctgtcctcggacccctttggattcttcaagccagtttgcttaaagtaccctacttgtgcgcgtccaaggccttctccggatctgcgcgttagcgcggaagatggtcggaggccactacgtgcaaatggttatcatcaagttagggatgcttactggcacctatgtttataaccatctcacccccctccgggactggcgcacaacggcctgcgagatctggccgtggctgtagaaccagtcgtcttctcccaaatggagaccaagctcatcacgtggggggcagacactgccgcgtgcggtgacatcatcaacggcttgcccgttccgcccgtaggggccaggagatactgctcggaccagccgatggaatggtctccaaggggtggaggttgctggcgcccatcacggcgtacgcccagcagacaaggggcctcctagggtgcataatcaccagcctaaccggcgggataaaaaccaagtggagggtgaggtccagattgtgtcaactgctgcccaaactttcctggcaacgtgcatcagtggggtatgctggactgtctaccacggggccggaacgaggactattgcatctccaaaggccctgttatccagatgtataccaatgtggacaaagaccttgtgggctggcccgctcctcaaggtgcccgctcattgacaccctgcacctgcggctcctcggacctttacctggtcacgaggcatgccgatgtctccccgtgcgccggcggggtgatagcaggggcagcctgctctcgccccggcccatttcctatctgaaaggctcctcggggggcccgctgttgtgccccgcgggacacgccgtaggcatattcagggcgcggtgtgcacccgtggagtggctaaggcggtggactttatccctgtggagaacctagagacaaccatgaggtccccggtgttcacggacaactcctctccgccagcagtgccccagagcttccaggtggcccacctgcatctcccacaggcagcggcaagagcaccaaggtcccggctgcgtatgcggctcagggctataaggtgctagtactcaacccctctgtcgctgcaacactgggctttggtgcttatatgtccaaggcccagggatcgatcctaatatcaggaccggggcgagaacaattaccactggcagccccatcacgtactccacctacggcaaatttcttgccgacggcgggtgctcggggggcgcttatgatataataatttgtgacgagtgccatccacggatgccacatccatcttgggcatcggcactgtccttgaccaggcagagaccgcgggggcgagactggttgtgctcgccaccgccacccctccgggctccgtcactgtgccccatcctaacatgaggaggttgctctgtccaccaccggagagattcctttctatggcaaggctatccccctcgaagtartcaaaggggggagacatctcattttttgtcactcaaagaagaagtgcgacgagctcgccgcaaagctagtcgcatgggcatcaatgccgtggcctactaccgcggtcttgacgtgtccgtcatcccgaccagcggcgatgttgtcgtcgtggcaactgatgctctcatgaccggctttaccggcgacttcgactcggtgatgactgcaacacgtgtgtcacccagacggtcgacttcagccttgaccctactttcaccattgagacaaccacgcttccccaggatgctgtctcccgcactcaacgtcggggtaggactggcagggggaagccaggcatctacgatttgtggcaccgggggagcgcccctccggcatgttcgactcgtccatcctctgtgagtgctatgacgcgggctgtgcttggtatgagctcacgcccgccgagactacagttagactacgagcgtaatgaacaccccggggcttcccgtgtgccaagaccatcttgaattttgggagggcgtcttcacaggcctcactcatatagatgcccacttcctatcccaaacaaagcagagtggggagaatcttccttacctggtagcgtacaagccaccgtgtgcgctagggctcaagcccctcccccatcgtgggaccagatgtggaagtgtttgatccgcctcaaacccaccctccatgggccaacacctctgctatacagactgggcgctgtccaaatgaggtcaccctgacgcacccagtcaccaaatacattatga

SEQ ID NO: 85 - DNA, 4853 bp, Hepatitis C virus; identical to SEQ ID NO: 23

SEQ ID NO: 86 - DNA, 4853 bp, Hepatitis C virus; identical to SEQ ID NO: 34

SEQ ID NO: 87 - DNA, 4853 bp, Hepatitis C virus
tcgcccacaggacgttaagttcccgggtggcggtcagatcgttggtggagtttacttgttgccgcgcaggggccctagaatgggtgtgcgcgcgccgaggaagacttccgagcggtcgcaacctcgagtagacgtcagcctatccccaaggcacgtcggcccgagggcaggacctgggctcagcccgggtacccttggcccctctatggcaatgagggctgcgggtgggcgggatggctcctgtccccccgcggtctcggcctagttggggccccacagacccccggcgtaggtcgcgcaatttgggtaaggtcatcgacacccttacgtgcggcttcgccgacctcatggggtacataccgctcgtcggcgcccctcttggaggcgctgccaggccctggcgcatggcgttcgggttctggaagacggcgtgaactatgcaacagggaaccttcctggttgctctttctctatcttctttctggccctgctctcttgtctgactgtgcccgcttcggcctacaagtgcgcaactctacagggctctaccacgtcaccaatgattgccctaactcgagtattgtgtacgaggcgcctgatgccatcctgcacactccggggtgtgtcccttgcgttcgcgagggtaacgcctcgaggtgttggtggcgatgacccccacggtggccaccagggacggcaaactccccgcgacgcagcttcgacgtcacatcgatctgcttgtcgggagcgccaccctctgttcggctctttacgtgggggacctgtgcggtctgtctttcttgtgggtcaactgtttaccttctcccccaggcgccactggacgacgcaagactgcaattgctctatctatcccggccatataacgggtcaccgcatggcatgggatatgatgatgaactggtccccgacgcggcgttggtaatggctcagctgctccggatcccgcaagccatcttggacatgatcgctggtgcccactggggagtcttggcgggcatagcgtatttctccatggtggggaactgggcgaaggtcctgtagtgctgctgctattcgccggcgtcgacgcggaaaccatgaccaccgggggggccgccgctcgcaacgtgtatagaatttccagcttcttctcgccgggcccccagcagaacatccagctgatcaacaccaacggcagtggcacatcaataggacggccttgaactgcaacgacagccttaacaccggctggttagcagggcttttctatcatcgcagcttcaactcttcaggctgtcctgcgaggctggccagctgccgacgtctaccgactttgcccagggctggggccctatcagccatgccaacggcagcggccccgaccaacgcccctactgttggcactaccccccaaaaccttgcggtattgtgcccgcacggaacgtgtgtggcccggtatattgcttccccccagtcccgtggcggtgggaacgaccgacagggcgggcgtccctacctaccgctggggtgaaaatgaaacggacgtcttcgtccttaacaacaccaggccaccgctgggcaattggttcggttgacctggatgaattcaactggattcaccaaagtgtgcggagcgcctccttgtgtcatcggaggagtgggcaacgacaccttgtactgccccactgattgtttccgcaagcatccggaagccacatattcccggtgcggctccgtccctggattacacccagatgcctggttgactacccgtataggctttggcattatccttgtaccgtcaactacaccatattcaaagtcaggatgtatgtgggaggggtcgagcataggctggatgcgcctgcaactggacgcggggcgaacgttgctatctggaagacagggacaggtccgagctcagcccgttgctgctgtccactacacagtggcaggtccttccgtgctccttcacgaccttgccagccttgtccaccggcctctccacctccaccagaacattgtggacgtgcagtacctgtacggggtagggtcaagcatcgcgtcctgggccattaagtgggagtacgtcgttctcctgttccttctgcttgcagacgcgcgcgtctgtcctgcctgtggatgatgctactcatatcccaagcggaggcggctttggagaacctcgtaatactcaatgcagcatccctggccgggacgcaaggtcttgtatccttcctcgtgttcttctgctttgcgtggtatctgaaggtaggtgggtgccaggagcggtttacgccctctacggaatgtggcctctcctcctgctcctgttggcgttgccccagcgggcatacgcgctggacacggaggtggccgcgtcgtgtggcggcgttgtcttgtcgggttgatgatgctgactctgtcaccgtattacaagcgctatatcagctggtgcttatggtggcttcagtattttctgactagggcagaagcgcaactgcacgtgtgggttccccccctcaacgttcgagggggggcgacgctgccatcttactcacatgcgttgtacacccgactctggtatttgacatcaccaaactactgctggctgtcctcggacccctttggattcttcaagccagtttgcttaaagtaccctacttgtgcgcgtccaaggccttctccggatctgcgcgttagcgcggaagatggtcggaggccactacgtgcaaatggttatcatcaagttagggatgcttactggcacctatgtttataaccatctcacccccctccgggactggcgcacaacggcctgcgagatctggccgtggctgtagaaccagtcgtcttctcccaaatggagaccaagctcatcacgtggggggcagacactgccgcgtgcggtgacatcatcaacggcttgcccgttccgcccgtaggggccaggagatactgctcggaccagccgatggaatggtctccaaggggtggaggttgctggcgcccatcacggcgtacgcccagcagacaaggggcctcctagggtgcataatcaccagcctaaccggcgggataaaaaccaagtggagggtgaggtccagattgtgtcaactgctgcccaaactttcctggcaacgtgcatcagtggggtatgctggactgtctaccacggggccggaacgaggactattgcatctccaaaggccctgttatccagatgtataccaatgtggacaaagaccttgtgggctggcccgctcctcaaggtgcccgctcattgacaccctgcacctgcggctcctcggacctttacctggtcacgaggcatgccgatgtctccccgtgcgccggcggggtgatagcaggggcagcctgctctcgccccggcccatttcctatctgaaaggctcctcggggggcccgctgttgtgccccgcgggacacgccgtaggcatattcagggcgcggtgtgcacccgtggagtggctaaggcggtggactttatccctgtggagaacctagagacaaccatgaggtccccggtgttcacggacaactcctctccgccagcagtgccccagagcttccaggtggcccacctgcatctcccacaggcagcggcaagagcaccaaggtcccggctgcgtatgcggctcagggctataaggtgctagtactcaacccctctgtcgctgcaacactgggctttggtgcttatatgtccaaggcccagggatcgatcctaatatcaggaccggggcgagaacaattaccactggcagccccatcacgtactccacctacggcaaatttcttgccgacggcgggtgctcggggggcgcttatgatataataatttgtgacgagtgccatccacggatgccacatccatcttgggcatcggcactgtccttgaccaggcagagaccgcgggggcgagactggttgtgctcgccaccgccacccctccgggctccgtcactgtgccccatcctaacatgaggaggttgctctgtccaccaccggagagattcctttctatggcaaggctatccccctcgaagtaatcaaaggggggagacatctcattttttgtcactcaaagaagaagtgcgacgagctcgccgcaaagctagtcgcatgggcatcaatgccgtggcctactaccgcggtcttgacgtgtccgtcatcccgaccagcggcgatgttgtcgtcgtggcaactgatgctctcatgaccggctttaccggcgacttcgactcggtgatgactgcaacacgtgtgtcacccagacggtcgacttcagccttgaccctactttcaccattgagacaaccacgcttccccaggatgctgtctcccgcactcaacgtcggggtaggactggcagggggaagccaggcatctacgatttgtggcaccgggggagcgcccctccggcatgttcgactcgtccatcctctgtgagtgctatgacgcgggctgcgcttggtatgagctcacgcccgccgagactacagttagactacgagcgtaatgaacaccccggggcttcccgtgtgccaagaccatcttgaattttgggagggcgtcttcacaggcctcactcatatagatgcccacttcctatcccaaacaaagcagagtggggagaatcttccttacctggtagcgtacaagccaccgtgtgcgctagggctcaagcccctcccccatcgtgggaccagatgtggaagtgtttgatccgcctcaaacccaccctccatgggccaacacctctgctatacagactgggcgctgtccaaatgaggtcaccctgacgcacccagtcaccaaatacattatga

SEQ ID NO: 88 - DNA, 4853 bp, Hepatitis C virus
tcgcccacaggacgttaagttcccgggtggcggtcagatcgttggtggagtttacttgttgccgcgcaggggccctagaatgggtgtgcgcgcgccgaggaagacttccgagcggtcgcaacctcgagtagacgtcagcctatccccaaggcacgtcggcccgagggcaggacctgggctcagcccgggtacccttggcccctctatggcaatgagggctgcgggtgggcgggatggctcctgtctccccgcggtctcggcctagttggggccccacagacccccggcgtaggtcgcgcaatttgggtaaggtcatcgatacccttacgtgcggcttcgccgacctcatggggtacataccgctcgtcggcgcccctcttggaggcgctgccaggccctggcgcatggcgtccgggtcctggaagacggcgtgaactatgcaacagggaaccttcctggttgctctttctctatcttccttctggccctgctctcttgtctgactgtgcccgcttcggcctacaagtgcgcaactccacggggctctatcacgtcaccaatgattgccctaactcgagtattgtgtacgaggcgcctgatgccatcctgcacactccggggtgtgtcccttgcgttcgcgagggtaatgcctcgaggtgttggtggcgatgacccccacggtggccaccagggacggcaaactccctgcgacgcagctccgacgtcacatcgatctgcttgtcgggagcgccaccctctgttcggccctctacgtgggggacctgtgcggtctgtctttcttgttggtcaactgtttaccttctctcccaggcgccactggacgacgcaagactgcaattgttctatctatcccggccatataacgggccaccgcatggcatgggatatgatgatgaactggtccccgacgcagcgttggtaatggctcagctgctccggatcccgcaagccatcttggacatgatcgctggtgctcactggggagtcctggcgggcatagcgtatttctccatggtggggaactgggcgaaggtcctgtagtgctgttgctattcgccggcgtcgatgcggaaaccgtcgtcaccggggggaccgccgctcgcaacgcgtacggactctctagtctcttcatgcggggccccaagcagaacatccagctgatcaacaccaacggcagtggcacatcaataggacggccttgaactgcaacgatagccttaacaccggctggctagcagggcttttctatcagcacaacttcaactcttcaggctgtcctgagaggctggccagctgccgacgcctgccgattttgcccagggctggggccctatcagccatgccaacggcagcggccccgaccaccgcccctactgctggcactaccccccaaaaccttgcggtattgtgcccgcacagaacgtgtgtggtccggtatattgcttcctcccagccccgtggcggtgggaacgaccgacaggtcgggcgtccctacctaccgctggggtgaaaatgagacggacgtcttcgtccttaacaacaccaggccaccgctgggcaattggtttggttgacctggatgaactcaactggattcaccaaagtgtgcggagcgcctccttgtgtcatcggaggggcgggcaacaacaccttgcactgccccaccgattgtttccgcaagcatccggaagccacatactcccggtgcggctccgtccctggattacacccagatgcatggtcgactacccgtataggctttggcattatccttgtaccatcaactataccatatttaaagtcaggatgtacgtgggaggggtcgagcataggctggatgtgcctgcaactggacgcggggcgaacgctgcgatctggaagacagggacaggtccgagctcagcccgttgctgctgtccaccacacagtggcaggtccttccgtgttccttcacgaccttgccggccttgtccaccggcctctccacctccaccagaacatcgtggacgtacagtacctgtacggggtggggtcaagcattgcgtcctgggccattaagtgggagtacgtcgttctcctgttccttctgcttgcagacgcgcgcgtctgtcctgcctgtggatgatgctactcatatcccaagcggaggcggctttggagaacctcgtaacactcaatgcagcatccctggccgggacgcaaggtcttgtatccttcctcgtgttcttctgtttcgcgtggtatctgaaggtaggtgggtgccaggagcggtttacgccctctacgggatgtggcctctcctcctgctcctgttggcgttgccccagcgggcatacgcgctggacacggaggtggccgcgtcgtgtggcggcgttgtctcgtcgggttgatggcgctgactctgtcaccgtattacaagcgctacatcagctggtgcttatggtggctccagtattttctgactagagcagaagcgcaactgcacgtatgggttccccccctcaacgctcgagggggggcgacgctgtcatcttactcatgtgtgttgtacacccgactttggtatttgacatcaccaaactactgctggccgtcctcggacccctttggattcttcaagccagtctgcttaaagtaccctacttgtgcgcgtccagggccttctccggatctgcgcgttagcgcggaagatggttgggggccactacgtgcaaatggttatcatcaagctagggacgcttactggcacctatgtttacaaccatctcactcctcttcgggactggcgcacaacggcctgcgagatctggccgtggctgtagagccagtcgtcttctcccaaatggagaccaagctcatcacatggggggcagacactgccgcgtgcggtgacatcatcaacggcttgcccgttccgcccgtaggggccgggagatactgctcggaccagccgatggaatggtctccaaggggtggaggttgctggcgcccatcacggcgtacgcccagcagacaaggggcctcttaggatgcataatcaccagcctgaccggcgggacaaaaaccaagtggagggtgaagtccagattgtgtcaactgctgcccaaactttcctcgcaacgtgcatcagtggggtatgctggactgtctaccacggggccggaacgaggactattgcatctccaaaggccctgttatccagatgtataccaatgtggacaaagaccttgtgggctggcccgcccctcaaggtgcccgctcattgacgccctgcacctgcggctcctcggacctttacctggtcacgaggtatgccgatgtctccccgtgcgccggcggggtgatagcaggggcagcctgctttcgccccggcccatttcctatttgaaaggttcctcggggggcccgctgttgtgccccgcgggacacgccgtaggcatattcagggcgcggtgtgcacccgtggagtggctaaggcggtggactttatccccgtggagaacctagagacaaccatgaggtccccggtgtttacggacaactcctctccgccagcagtgccccagagcttccaggtggcccacctgcatctcccacgggcagcggcaagagcaccaaggtcccagctgcatatgcggctcagggctataaagtgctagtgctcaacccctctgttgctgcaacactgggctttggtgcttatatgtccaaggcccagggattgatcctaacatcaggaccggggcgagaacaattaccactggcagccccatcacgtactccacctacggcaagttccttgccgacggcgggtgctcggggggcgcctatgatataataatttgtgacgagtgccacccacggatgccacatccatcttgggcatcggcactgtccttgaccaggcagagaccgcgggggcgagactagttgtgctcgccaccgccacccctccgggctccatcactgtgccccatcctaacatgaggaggttgctctgtccaccaccggagagattcctttctatggcaaggctatccccctcgaagtaatcaaaggggggagacatctcattttttgtcactcaaagaagaagtgcgatgagctcgccgcaaagctggtcgcatgggcatcaatgccgtggcctactaccgcggtcttgacgtgtccgtcatcccgaccagcggcgatgttgtcgtcgtggcaactgatgctctcatgaccggttttaccggcgacttcgactcggtgatgactgcaacacgtgtgtcacccagacggtcgatttcagccttgaccctaccttcaccattgagacaaccacgcttccccaagatgctgtctcccgcactcagcgtcggggcaggactggcagggggaagccaggcatctacggtttgtggcaccaggggagcgcccttccggcatgttcgactcgtccatcctctgtgagtgctatgacgcgggttgtgcttggtatgagctcacacccgccgagactacagttagactacgagcgtaatgaacaccccggggcttcccgtgtgccaagaccatctcgaattttgggagggggtcttcacaggcctcactcatatagatgcccacttcctatcccagacaaagcagagtggggagaatcttccttacctggtagcgtacaagccaccgtgtgcgctagggctcaagcccctcccccatcgtgggaccagatgtggaagtgtttgatccgcctcaaacccacccttcatgggccaacacctctgctatacagactgggtgctgtccaaatgaggtcaccctgacgcacccagtcaccaaatatatcatga

SEQ ID NO: 89 - DNA, 4853 bp, Hepatitis C virus
tcgcccacaggacgttaagttcccgggtggcggtcagatcgttggtggagtttacttgttgccgcgcaggggccctagaatgggtgtgcgcgcgccgaggaagacttccgagcggtcgcaacctcgagtagacgtcagcctatccccaaggcacgtcggcccgagggcaggacctgggctcagcccgggtacccttggcccctctatggcaatgagggctgcgggtgggcgggatggctcctgtccccccgcggtctcggcctagttggggccccacagacccccggcgtaggtcgcgcaatttgggtaaggtcatcgacacccttacgtgcggcttcgccgaccttatggggtacataccgctcgtcggcgcccctcttggaggcgctgccaggccctggcgcatggcgttcgggttctggaagacggcgtgaactatgcaacagggaaccttcctggttgctctttctctatcttctttctggccctgctctcttgtctgactgtgcccgcttcggcctacaagtgcgcaactctacagggctctaccacgtcaccaatgattgccctaactcgagtattgtgtacgaggcgcctgatgccatcctgcacactccggggtgtgtcccttgcgttcgcgagggtaacgcctcgaggtgttggtggcgatgacccccacggtggccaccagggacggcaaactccccgcgacgcagcttcgacgtcacatcgatctgcttgtcgggagcgccaccctctgttcggctctttacgtgggggacctgtgcggtctgtctttcttgtgggtcaactgtttaccttctcccccaggcgccactggacgacgcaagactgcaattgctctatctatcccggccatataacgggtcaccgcatggcatgggatatgatgatgaactggtccccgacgcggcgttggtaatggctcagctgctccggatcccgcaagccatcttggacatgatcgctggtgcccactggggagtcttggcgggcatagcgtatttctccatggtggggaactgggcgaaggtcctgtagtgctgctgctattcgccggcgtcgacgcggaaaccatgaccaccgggggggccgccgctcgcaacgtgtatagaatttccagcttcttctcgccgggcccccagcagaacatccagctgatcaacaccaacggcagtggcacatcaataggacggccttgaactgcaacgacagccttaacaccggctggttagcagggcttttctatcatcgcagcttcaactcttcaggctgtcctgcgaggctggccagctgccgacgcctaccgactttgcccagggctggggccctatcagccatgccaacggcagcggccccgaccaacgcccctactgttggcactaccccccaaaaccttgcggtattgtgcccgcacggaacgtgtgtggcccggtatattgcttccccccagtcccgtggcggtgggaacgaccgacagggcgggcgtccctacctaccgctggggtgaaaatgaaacggacgtcttcgtccttaacaacaccaggccaccgctgggcaattggttcggttgacctggatgaattcaactggattcaccaaagtgtgcggagcgcctccttgtgtcatcggaggagtgggcaacgacaccttgtactgccccactgattgtttccgcaagcatccggaagccacatattcccggtgcggctccgtccctggattacacccagatgcctggttgactacccgtataggctttggcattatccttgtaccgtcaactacaccatattcaaagtcaggatgtatgtgggaggggtcgagcataggctggatgcgcctgcaactggacgcggggcgaacgttgcgatctggaagacagggacaggtccgagctcagcccgttgctgctgtccactacacagtggcaggtccttccgtgctccttcacgaccttgccagccttgtccaccggcctctccacctccaccagaacattgtggacgtgcagtacctgtacggggtagggtcaagcatcgcgtcctgggccattaagtgggagtacgtcgttctcctgttccttctgcttgcagacgcgcgcgtctgtcctgcctgtggatgatgctactcatatcccaagcggaggcggctttggagaacctcgtaatactcaatgcagcatccctggccgggacgcaaggtcttgtatccttcctcgtgttcttctgctttgcgtggtatctgaaggtaggtgggtgccaggagcggtttacgccctctacggaatgtggcctctcctcctgctcctgttggcgttgccccagcgggcatacgcgctggacacggaggtggccgcgtcgtgtggcggcgttgtcttgtcgggttgatgatgctgactctgtcaccgtattacaagcgctatatcagctggtgcttatggtggcttcagtattttctgactagggcagaagcgcaactgcacgtgtgggttccccccctcaacgttcgagggggggcgacgctgccatcttactcacatgcgttgtacacccgactctggtatttgacatcaccaaactactgctggctgtcctcggacccctttggattcttcaagccagtttgcttaaagtaccctacttgtgcgcgtccaaggccttctccggatctgcgcgttagcgcggaagatggtcggaggccactacgtgcaaatggttatcatcaagttagggatgcttactggcacctatgtttataaccatctcacccccctccgggactggcgcacaacggcctgcgagatctggccgtggctgtagaaccagtcgtcttctcccaaatggagaccaagctcatcacgtggggggcagacactgccgcgtgcggtgacatcatcaacggcttgcccgttccgcccgtaggggccaggagatactgctcggaccagccgatggaatggtctccaaggggtggaggttgctggcgcccatcacggcgtacgcccagcagacaaggggcctcctagggtgcataatcaccagcctaaccggcgggataaaaaccaagtggagggtgaggtccagattgtgtcaactgctgcccaaactttcctggcaacgtgcatcagtggggtatgctggactgtctaccacggggccggaacgaggactattgcatctccaaaggccctgttatccagatgtataccaatgtggacaaagaccttgtgggctggcccgctcctcaaggtgcccgctcattgacaccctgcacctgcggctcctcggacctttacctggtcacgaggcatgccgatgtctccccgtgcgccggcggggtgatagcaggggcagcctgctctcgccccggcccatttcctatctgaaaggctcctcggggggcccgctgttgtgccccgcgggacacgccgtaggcatattcagggcgcggtgtgcacccgtggagtggctaaggcggtggactttatccctgtggagaacctagagacaaccatgaggtccccggtgttcacggacaactcctctccgccagcagtgccccagagcttccaggtggcccacctgcatctcccacaggcagcggcaagagcaccaaggtcccggctgcgtatgcggctcagggctataaggtgctagtactcaacccctctgtcgctgcaacactgggctttggtgcttatatgtccaaggcccagggatcgatcctaatatcaggaccggggcgagaacaattaccactggcagccccatcacgtactccacctacggcaaatttcttgccgacggcgggtgctcggggggcgcttatgatataataatttgtgacgagtgccatccacggatgccacatccatcttgggcatcggcactgtccttgaccaggcagagaccgcgggggcgagactggttgtgctcgccaccgccacccctccgggctccgtcactgtgccccatcctaacatgaggaggttgctctgtccaccaccggagagattcctttctatggcaaggctatccccctcgaagtaatcaaaggggggagacatctcattttttgtcactcaaagaagaagtgcgacgagctcgccgcaaagctagtcgcatgggcatcaatgccgtggcctactaccgcggtcttgacgtgtccgtcatcccgaccagcggcgatgttgtcgtcgtggcaactgatgctctcatgaccggctttaccggcgacttcgactcggtgatgactgcaacacgtgtgtcacccagacggtcgacttcagccttgaccctactttcaccattgagacaaccacgcttccccaggatgctgtctcccgcactcaacgtcggggtaggactggcagggggaagccaggcatctacgatttgtggcaccgggggagcgcccctccggcatgttcgactcgtccatcctctgtgagtgctatgacgcgggctgtgcttggtatgagctcacgcccgccgagactacagttagactacgagcgtaatgaacaccccggggcttcccgtgtgccaagaccatcttgaattttgggagggcgtcttcacaggcctcactcatatagatgcccacttcctatcccaaacaaagcagagtggggagaatcttccttacctggtagcgtacaagccaccgtgtgcgctagggctcaagcccctcccccatcgtgggaccagatgtggaagtgtttgatccgcctcaaacccaccctccatgggccaacacctctgctatacagactgggcgctgtccaaatgaggtcaccctgacgcacccagtcaccaaatacattatga

SEQ ID NO: 90 - DNA, 4853 bp, Hepatitis C virus; identical to SEQ ID NO: 49

SEQ ID NO: 91 - DNA, 4853 bp, Hepatitis C virus
tcgcccacaggacgttaagttcccgggtggcggtcagatcgttggtggagtttacttgttgccgcgcaggggccctagaatgggtgtgcgcgcgccgaggaagacttccgagcggtcgcaacctcgagtagacgtcagcctatccccaaggcacgtcggcccgagggcaggacctgggctcagcccgggtacccttggcccctctatggcaatgagggctgcgggtgggcgggatggctcctgtccccccgcggtctcggcctagttggggccccacagacccccggcgtaggtcgcgcaatttgggtaaggtcatcgacacccttacgtgcggcttcgccgacctcatggggtacataccgctcgtcggcgcccctcttggaggcgctgccaggccctggcgcatggcgttcgggttctggaagacggcgtgaactatgcaacagggaaccttcctggttgctctttctctatcttctttctggccctgctctcttgtctgactgtgcccgcttcggcctacaagtgcgcaactctacagggctctaccacgtcaccaatgattgccctaactcgagtattgtgtacgaggcgcctgatgccatcctgcacactccggggtgtgtcccttgcgttcgcgagggtaacgcctcgaggtgttggtggcgatgacccccacggtggccaccagggacggcaaactccccgcgacgcagcttcgacgtcacatcgatctgcttgtcgggagcgccaccctctgttcggctctttacgtgggggacctgtgcggtctgtctttcttgtgggtcaactgtttaccttctcccccaggcgccactggacgacgcaagactgcaattgctctatctatcccggccatataacgggtcaccgcatggcatgggatatgatgatgaactggtccccgacgcggcgttggtaatggctcagctgctccggatcccgcaagccatcttggacatgatcgctggtgcccactggggagtcttggcgggcatagcgtatttctccatggtggggaactgggcgaaggtcctgtagtgctgctgctattcgccggcgtcgacgcggaaaccatgaccaccgggggggccgccgctcgcaacgtgtatagaatttccagcttcttctcgccgggcccccagcagaacatccagctgatcaacaccaacggcagtggcacatcaataggacggccttgaactgcaacgacagccttaacaccggctggttagcagggcttttctatcatcgcagcttcaactcttcaggctgtcctgcgaggctggccagctgccgacgcctaccgactttgcccagggctggggccctatcagccatgccaacggcagcggccccgaccaacgcccctactgttggcactaccccccaaaaccttgcggtattgtgcccgcacggaacgtgtgtggcccggtatattgcttccccccagtcccgtggcggtgggaacggccgacagggcgggcgtccctacctaccgctggggtgaaaatgaaacggacgtcttcgtccttaacaacaccaggccaccgctgggcaattggttcggttgacctggatgaattcaactggattcaccaaagtgtgcggagcgcctccttgtgtcatcggaggagtgggcaacgacaccttgtactgccccactgattgtttccgcaagcatccggaagccacatattcccggtgcggctccgtccctggattacacccagatgcctggttgactacccgtataggctttggcattatccttgtaccgtcaactacaccatattcaaagtcaggatgtatgtgggaggggtcgagcataggctggatgcgcctgcaactggacgcggggcgaacgttgcgatctggaagacagggacaggtccgagctcagcccgttgctgctgtccactacacagtggcaggtccttccgtgctccttcacgaccttgccagccttgtccaccggcctctccacctccaccagaacattgtggacgtgcagtacctgtacggggtagggtcaagcatcgcgtcctgggccattaagtgggagtacgtcgttctcctgttccttctgcttgcagacgcgcgcgtctgtcctgcctgtggatgatgctactcatatcccaagcggaggcggctttggagaacctcgtaatactcaatgcagcatccctggccgggacgcaaggtcttgtatccttcctcgtgttcttctgctttgcgtggtatctgaaggtaggtgggtgccaggagcggtttacgccctctacggaatgtggcctctcctcctgctcctgttggcgttgccccagcgggcatacgcgctggacacggaggtggccgcgtcgtgtggcggcgttgtcttgtcgggttgatgatgctgactctgtcaccgtattacaagcgctatatcagctggtgcttatggtggcttcagtattttctgactagggcagaagcgcaactgcacgtgtgggttccccccctcaacgttcgagggggggcgacgctgccatcttactcacatgcgttgtacacccgactctggtatttgacatcaccaaactactgctggctgtcctcggacccctttggattcttcaagccagtttgcttaaagtaccctacttgtgcgcgtccaaggccttctccggatctgcgcgttagcgcggaagatggtcggaggccactacgtgcaaatggttatcatcaagttagggatgcttactggcacctatgtttataaccatctcacccccctccgggactggcgcacaacggcctgcgagatctggccgtggctgtagaaccagtcgtcttctcccaaatggagaccaagctcatcacgtggggggcagacactgccgcgtgcggtgacatcatcaacggcttgcccgttccgcccgtaggggccaggagatactgctcggaccagccgatggaatggtctccaaggggtggaggttgctggcgcccatcacggcgtacgcccagcagacaaggggcctcctagggtgcataatcaccagcctaaccggcgggataaaaaccaagtggagggtgaggtccagattgtgtcaactgctgcccaaactttcctggcaacgtgcatcagtggggtatgctggactgtctaccacggggccggaacgaggactattgcatctccaaaggccctgttatccagatgtataccaatgtggacaaagaccttgtgggctggcccgctcctcaaggtgcccgctcattgacaccctgcacctgcggctcctcggacctttacctggtcacgaggcatgccgatgtctccccgtgcgccggcggggtgatagcaggggcagcctgctctcgccccggcccatttcctatctgaaaggctcctcggggggcccgctgttgtgccccgcgggacacgccgtaggcatattcagggcgcggtgtgcacccgtggagtggctaaggcggtggactttatccctgtggagaacctagagacaaccatgaggtccccggtgttcacggacaactcctctccgccagcagtgccccagagcttccaggtggcccacctgcatctcccacaggcagcggcaagagcaccaaggtcccggctgcgtatgcggctcagggctataaggtgctagtactcaacccctctgtcgctgcaacactgggctttggtgcttatatgtccaaggcccagggatcgatcctaatatcaggaccggggcgagaacaattaccactggcagccccatcacgtactccacctacggcaaatttcttgccgacggcgggtgctcggggggcgcttatgatataataatttgtgacgagtgccatccacggatgccacatccatcttgggcatcggcactgtccttgaccaggcagagaccgcgggggcgagactggttgtgctcgccaccgccacccctccgggctccgtcactgtgccccatcctaacatgaggaggttgctctgtccaccaccggagagattcctttctatggcaaggctatccccctcgaagtaatcaaaggggggagacatctcattttttgtcactcaaagaagaagtgcgacgagctcgccgcaaagctagtcgcatgggcatcaatgccgtggcctactaccgcggtcttgacgtgtccgtcatcccgaccagcggcgatgttgtcgtcgtggcaactgatgctctcatgaccggctttaccggcgacttcgactcggtgatgactgcaacacgtgtgtcacccagacggtcgacttcagccttgaccctactttcaccattgagacaaccacgcttccccaggatgctgtctcccgcactcaacgtcggggtaggactggcagggggaagccaggcatctacgatttgtggcaccgggggagcgcccctccggcatgttcgactcgtccatcctctgtgagtgctatgacgcgggctgtgcttggtatgagctcacgcccgccgagactacagttagactacgagcgtaatgaacaccccggggcttcccgtgtgccaagaccatcttgaattttgggagggcgtcttcacaggcctcactcatatagatgcccacttcctatcccaaacaaagcagagtggggagaatcttccttacctggtagcgtacaagccaccgtgtgcgctagggctcaagcccctcccccatcgtgggaccagatgtggaagtgtttgatccgcctcaaacccaccctccatgggccaacacctctgctatacagactgggcgctgtccaaatgaggtcaccctgacgcacccagtcaccaaatacattatga

SEQ ID NO: 92 - DNA, 4853 bp, Hepatitis C virus; identical to SEQ ID NO: 34

SEQ ID NO: 93 - DNA, 4853 bp, Hepatitis C virus
tcgcccacaggacgttaagttcccgggtggcggtcagatcgttggtggagtttacttgttgccgcgcaggggccctagaatgggtgtgcgcgcgccgaggaagacttccgagcggtcgcaacctcgagtagacgtcagcctatccccaaggcacgtcggcccgagggtaggacctgggctcagcccgggtacccttggcccctctatggcaatgagggctgcgggtgggcgggatggctcctgtctccccgcggtctcggcctagttggggccccacagacccccggcgtaggtcgcgcaatttgggtaaggtcatcgatacccttacgtgcggcttcgccgacctcatggggtacataccgctcgtcggcgcccctcttggaggcgctgccaggccctggcgcatggcgtccgggttctggaagacggcgtgaactatgcaacggggaaccttcccggttgctctttctctatcttccttctggccctgctctcttgtctgactgtgcccgcttcggcctacaagtgcgcaactccacggggctctaccacgtcaccaatgattgccccaactcgagtattgtgtacgaggcgcctgatgccatcctgcacactccggggtgtgtcccttgcgttcgcgagggtaacgcctcgaggtgttggtggcgatgacccccacggtggccaccagggacggcaaactccctgcaacgcagctccgacgtcacatcgatctgcttgtcgggagtgccaccctctgttcggccctctacgtgggggacctgtgcggtctgtctttcttgttggtcaactgtttaccttctctcccaggcgccactggacgacgcaagactgcaattgttctatctatcccggccatataacgggccaccgcatggcatgggatatgatgatgaactggtccccgacgcggcgttggtaatggctcagctgctccggatcccgcaagccatcttggatatgatcgctggtgcccactggggagtcctggcgggcatagcgtatttctccatggtggggaactgggcgaaggtcctgtagtgctgctgctatttgccggcgtcgatgcgggaaccgtcgtcaccggaggggtcgccgcccgcaccgcgtatggatttactagtctcttcacgcgaggcgcccagcagaacatccagctgatcaacaccaacggcagtggcacatcaataggacggccttgaactgcaacgacagccttaacaccggctggttagcagggcttttctatcggaacaacttcaactcttcaggctgtcctcagaggttggccagctgccggcgcctgccgattttgcccagggctggggccctatcagccatgccaacggcagcggccccgaccaccgcccctactgctggcactaccccccaaaaccttgcggcattgtgcccgcacagaacgtgtgtggcccggtatattgcttcctcccagccccgtggcggtgggaacgaccgacagggcgggcatccctacctacagctggggtgaaaatgatacggacgtcttcgtccttaacaacaccaggccaccgctgggcaattggtttggttgacctggatgaactcaactggattcaccaaagtgtgtggagcgcccccttgtgtcatcggaggggtgggcaacaacaccttgcactgccccactgattgtttccgcaagcatccggaagccacatactcccggtgcggctccgtccctggattacacccagatgcctggtcgactacccgtataggctttggcattatccttgtaccatcaactataccatattcaaagtcaggatgtatgtgggaggggtcgagcataggctggatgcgcctgcaactggacgcggggcgaacgttgcgatctggaagacagggacaggtccgagctcagcccgttgctgctgtccactacacagtggcaggtccttccgtgttccttcacgaccttgccagccttgtccaccggtctctccacctccaccagaacatcgtggacgtgcagtacctgtacggggtggggtcaagcatcgcgtcctgggccatcaagtgggagtacgtcgttctcctgttccttctgcttgcagacgcgcgcgtctgtcctgcctgtggatgatgctactcatatcccaagcggaggcggctttggagaacctcgtaatactcaatgcagcatccctggccgggacgcaaggtcttgtatccttcctcgtgttcttctgctttgcatggtatctgaaggtaggtgggtgccaggagcggtttacgccctctacggaatgtggcctctcctcctgctcctgctggcgttgccccagcgggcatacgcgctggacacggaggtggccgcgtcgtgtggcggcgttgtctcgtcgggttgatggcgctgactctgtcaccgtattacaagcgctacatcagctggtgcttatggtggctccagtattttctgactagagcagaagcgcaactgcacgtgtgggttccccccctcaacgttcgagggggggcgacgccgtcatcttactcatgtgtgttgtacacccgactttggtatttgacatcaccaaactactgctggccgtcctcggacccctttggattcttcaagccagtttgcttaaagtaccctacttgtgcgcgtccaaggccttctccggatctgcgcgttagcgcggaagatggtcgggggccaatacgtgcaaatggttatcatcaagttagggacgcttactggcacctatgtttacaaccatctcactcctcttcgggactggcgcacaacggcctgcgagatctggccgtggctgtagagccagtcgtcttctcccaaatggagaccaagctcatcacgtggggggcagacactgccgcgtgcggtgacatcatcaacggtctgcccgttccgcccgtaggggtcgggagatactgctcggaccagccgatggaatggtctccaaggggtggaggttgctggcgcccatcacggcgtacgcccagcagacaaggggcctcctagggtgcataatcaccagcctaaccggcgggacaaaaaccaagtggagggtgaggtccagattgtgtcaactgctgcccaaactttcctggcaacgtgcatcagtggggtatgctggactgtctaccacggggccggaacgaggactattgcatctccaaaggccccgttatccagatgtataccaatgtggacaaagaccttgtgggctggcccgctcctcaaggtgcccgctcattgacaccctgcacctgcggctcctcggacctttacctggtcacgaggcatgccgatgtctccccgtgcgccggcggggtgatagcaggggcagcctgctctcgccccggcccatttcctacttgaaaggctcctcggggggcccgctgttgtgccccgcgggacacgccgtaggcatattcagggcgcggtgtgcacccgtggagtggctaaggcggtggactttatccctgtggagaacctagagacaaccatgaggtccccggtgttcacggacaactcctctccgccagcagtgccccagagcttccaggtggcccacctgcatctcccacaggcagcggcaagagcaccaaggtcccggctgcatacgcggctcagggctataaggtgctagtgctcaacccttctgttgctgcaacattgggctttggtgcttacatgtccaaggcccagggatcgatcctaatatcaggaccggggcgagaacaattactactggcagccccatcacgtactccacctacggtaagttccttgccgacggcgggtgctcggggggcgcttatgatataataatttgtgacgagtgccacccacggatgccacatccatcttgggcatcggcactgtccttgaccaggcagagaccgcgggggcgagactggttgtgctcgccaccgccacccctccgggctccgtcactgtgccccaccccaacatgaggaggttgctctgtccaccaccggagagattcctttctatggcaaggctatccccctcgaagtaatcaaaggggggagacatctcattttttgtcactcaaagaagaagtgcgacgagctcgccgcaaagctggtcgcatgggcatcaatgccgtggcctactaccgcggtcttgatgtgtctgtcatcccgaccagcggcgatgttgtcgtcgtggcaactgatgctctcatgaccggctttaccggcgacttcgactcggtgatgactgcaacacgtgtgtcacccagacggtcgatttcagccttgaccctaccttcaccattgagacaaccacgcttccccaagacgctgtctcccgcactcaacgtcggggcaggactggcagggggaagccaggcatctacgatttgtggcaccgggggagcgcccttccggcatgttcgactcgtccgtcctctgtgagtgctatgacgcgggctgtgcttggtatgagctcacgcccgccgagactacagttagactacgagcgtaatgaacaccccggggcttcccgtgtgccaagaccatctcgaattttgggagggcgtcttcacaggcctcactcatatagatgcccacttcctatcccagacaaagcagagtggggagaatcttccttacctggtagcgtacaagccaccgtgtgcgctagggctcaagcccctcccccatcgtgggaccagatgtggaagtgtttgatccgcctcaaacccaccctccatgggccaacacctctgctatacagactgggcgctgtccaaatgaggtcaccttgacgcacccagtcactaaatacatcatga

SEQ ID NO: 94 - DNA, 4853 bp, Hepatitis C virus
tcgcccacaggacgttaagttcccgggtggcggtcagatcgttggtggagtttacttgttgccgcgcaggggccctagaatgggtgtgcgcgcgccgaggaagacttccgagcggtcgcaacctcgagtagacgtcagcctatccccaaggcacgtcggcccgagggtaggacctgggctcagcccgggtacccttggcccctctatggcaatgagggctgcgggtgggcgggatggctcctgtctccccgcggtctcggcctagttggggccccacagacccccggcgtaggtcgcgcaatttgggtaaggtcatcgatacccttacgtgcggcttcgccgacctcatggggtacataccgctcgtcggcgcccctcttggaggcgctgccaggccctggcgcatggcgtccgggttctggaagacggcgtgaactatgcaacggggaaccttcccggttgctctttctctatcttccttctggccctgctctcttgtctgactgtgcccgcttcggcctacaagtgcgcaactccacggggctttaccacgtcaccaatgattgccccaactcgagtattgtgtacgaggcgcctgatgccatcctgcacactccggggtgtgtcccttgcgttcgcgagggtaacgcctcgaggtgttggtggcgatgacccccacggtggccaccagggacggcaaactccctgcaacgcagctccgacgtcacatcgatctgcttgtcgggagtgccaccctctgttcggccctctacgtgggggacctgtgcggtctgtctttcttgttggtcaactgtttaccttctctcccaggcgccactggacgacgcaagactgcaattgttctatctatcccggccatataacgggccaccgcatggcatgggatatgatgatgaactggtccccgacgcggcgttggtaatggctcagctgctccggatcccgcaagccatcttggatatgatcgctggtgcccactggggagtcctggcgggcatagcgtatttctccatggtggggaactgggcgaaggtcctgtagtgctgctgctatttgccggcgtcgatgcgggaaccgtcgtcaccggaggggtcgccgcccgcaccgcgtatggatttactagtctcttcacgcgaggcgcccagcagaacatccagctgatcaacaccaacggcagtggcacatcaataggacggccttgaactgcaacgacagccttaacaccggctggttagcagggcttttctatcggaacaacttcaactcttcaggctgtcctcagaggttggccagctgccggcgcctgccgattttgcccagggctggggccctatcagccatgccaacggcagcggccccgaccaccgcccctactgctggcactaccccccaaaaccttgcggcattgtgcccgcacagaacgtgtgtggcccggtatattgcttcctcccagccccgtggcggtgggaacgaccgacagggcgggcatccctacctacagctggggtgaaaatgatacggacgtcttcgtccttaacaacaccaggccaccgctgggcaattggtttggttgacctggatgaactcaactggattcaccaaagtgtgtggagcgcccccttgtgtcatcggaggggtgggcaacaacaccttgcactgccccactgattgtttccgcaagcatccggaagccacatactcccggtgcggctccgtccctggattacacccagatgcctggtcgactacccgtataggctttggcattatccttgtaccatcaactataccatattcaaagtcaggatgtatgtgggaggggtcgagcataggctggatgcgcctgcaactggacgcggggcgaacgttgcgatctggaagacagggacaggtccgagctcagcccgttgctgctgtccactacacagtggcaggtccttccgtgttccttcacgaccttgccagccttgtccaccggtctctccacctccaccagaacatcgtggacgtgcagtacctgtacggggtggggtcaagcatcgcgtcctgggccatcaagtgggagtacgtcgttctcctgttccttctgcttgcagacgcgcgcgtctgtcctgcctgtggatgatgctactcatatcccaagcggaggcggctttggagaacctcgtaatactcaatgcagcatccctggccgggacgcaaggtcttgtatccttcctcgtgttcttctgctttgcatggtatctgaaggtaggtgggtgccaggagcggtttacgccctctacggaatgtggcctctcctcctgctcctgctggcgttgccccagcgggcatacgcgctggacacggaggtggccgcgtcgtgtggcggcgttgtctcgtcgggttgatggcgctgactctgtcaccgtattacaagcgctacatcagctggtgcttatggtggctccagtattttctgactagagcagaagcgcaactgcacgtgtgggttccccccctcaacgttcgagggggggcgacgccgtcatcttactcatgtgtgttgtacacccgactttggtatttgacatcaccaaactactgctggccgtcctcggacccctttggattcttcaagccagtttgcttaaagtaccctacttgtgcgcgtccaaggccttctccggatctgcgcgttagcgcggaagatggtcgggggccaatacgtgcaaatggttatcatcaagttagggacgcttactggcacctatgtttacaaccatctcactcctcttcgggactggcgcacaacggcctgcgagatctggccgtggctgtagagccagtcgtcttctcccaaatggagaccaagctcatcacgtggggggcagacactgccgcgtgcggtgacattatcaacggtctgcccgttccgcccgtaggggtcgggagatactgctcggaccagccgatggaatggtctccaaggggtggaggttgctggcgcccatcacggcgtacgcccagcagacaaggggcctcctagggtgcataatcaccagcctaaccggcgggacaaaaaccaagtggagggtgaggtccagattgtgtcaactgctgcccaaactttcctggcaacgtgcatcagtggggtatgctggactgtctaccacggggccggaacgaggactattgcatctccaaaggccccgttatccagatgtataccaatgtggacaaagaccttgtgggctggcccgctcctcaaggtgcccgctcattgacaccctgcacctgcggctcctcggacctttacctggtcacgaggcatgccgatgtctccccgtgcgccggcggggtgatagcaggggcagcctgctctcgccccggcccatttcctacttgaaaggctcctcggggggcccgctgttgtgccccgcgggacacgccgtaggcatattcagggcgcggtgtgcacccgtggagtggctaaggcggtggactttatccctgtggagaacctagagacaaccatgaggtccccggtgttcacggacaactcctctccgccagcagtgccccagagcttccaggtggcccacctgcatctcccacaggcagcggcaagagcaccaaggtcccggctgcatacgcggctcagggctataaggtgctagtgctcaacccttctgttgctgcaacattgggctttggtgcttacatgtccaaggcccagggatcgatcctaatatcaggaccggggcgagaacaattactactggcagccccatcacgtactccacctacggtaagttccttgccgacggcgggtgctcggggggcgcttatgatataataatttgtgacgagtgccacccacggatgccacatccatcttgggcatcggcactgtccttgaccaggcagagaccgcgggggcgagactggttgtgctcgccaccgccacccctccgggctccgtcactgtgccccaccccaacatgaggaggttgctctgtccaccaccggagagattcctttctatggcaaggctatccccctcgaagtaatcaaaggggggagacatctcattttttgtcactcaaagaagaagtgcgacgagctcgccgcaaagctggtcgcatgggcatcaatgccgtggcctactaccgcggtcttgatgtgtctgtcatcccgaccagcggcgatgttgtcgtcgtggcaactgatgctctcatgaccggctttaccggcgacttcgactcggtgatgactgcaacacgtgtgtcacccagacggtcgatttcagccttgaccctaccttcaccattgagacaaccacgcttccccaagacgctgtctcccgcactcaacgtcggggcaggactggcagggggaagccaggcatctacgatttgtggcaccgggggagcgcccttccggcatgttcgactcgtccgtcctctgtgagtgctatgacgcgggctgtgcttggtatgagctcacgcccgccgagactacagttagactacgagcgtaatgaacaccccggggcttcccgtgtgccaagaccatctcgaattttgggagggcgtcttcacaggcctcactcatatagatgcccacttcctatcccagacaaagcagagtggggagaatcttccttacctggtagcgtacaagccaccgtgtgcgctagggctcaagcccctcccccatcgtgggaccagatgtggaagtgtttgatccgcctcaaacccaccctccatgggccaacacctctgctatacagactgggcgctgtccaaatgaggtcaccttgacgcacccagtcactaaatacatcatga

SEQ ID NO: 95 - DNA, 4853 bp, Hepatitis C virus
tcgcccacaggacgttaagttcccgggtggcggtcagatcgttggtggagtttacttgttgccgcgcaggggccctagaatgggtgtgcgcgcgccgaggaagacttccgagcggtcgcaacctcgagtagacgtcagcctatccccaaggcacgtcggcccgagggcaggacctgggctcagcccgggtacccttggcccctctatggcaatgagggctgcgggtgggcgggatggctcctgtctccccgcggtctcggcctagttggggccccacagacccccggcgtaggtcgcgcaatttgggtaaggtcatcgatacccttacgtgcggcttcgccgacctcatggggtacataccgctcgtcggcgcccctcttggaggcgctgccaggccctggcgcatggcgtccgggtcctggaagacggcgtgaactatgcaacagggaaccttcctggttgctctttctctatcttccttctggccctgctctcttgtctgactgtgcccgcttcggcctacaagtgcgcaactccacggggctctatcacgtcaccaatgattgccctaactcgagtattgtgtacgaggcgcctgatgccatcctgcacactccggggtgtgtcccttgcgttcgcgagggtaatgcctcgaggtgttggtggcgatgacccccacggtggccaccagggacggcaaactccctgcgacgcagctccgacgtcacatcgatctgcttgtcgggagcgccaccctctgttcggccctctacgtgggggacctgtgcggtctgtctttcttgttggtcaactgtttaccttctctcccaggcaccactggacgacgcaagactgcaattgttctatctatcccggccatataacgggccaccgcatggcatgggatatgatgatgaactggtccccgacgcagcgttggtaatggctcagctgctccggatcccgcaagccatcttggacatgatcgctggtgctcactggggagtcctggcgggcatagcgtatttctccatggtggggaactgggcgaaggtcctgtagtgctgttgctattcgccggcgtcgatgcggaaaccgtcgtcaccggggggaccgccgctcgcaacgcgtacggactctctagtctcttcatgcggggccccaagcagaacatccagctgatcaacaccaacggcagtggcacatcaataggacggccttgaactgcaacgatagccttaacaccggctggctagcagggcttttctatcagcacaacttcaactcttcaggctgtcctgagaggctggccagctgccgacgcctgccgattttgcccagggctggggccctatcagccatgccaacggcagcggccccgaccaccgcccctactgctggcactaccccccaaaaccttgcggtattgtgcccgcacagaacgtgtgtggtccggtatattgcttcctcccagccccgtggcggtgggaacgaccgacaggtcgggcgtccctacctaccgctggggtgaaaatgagacggacgtcttcgtccttaacaacaccaggccaccgctgggcaattggtttggttgacctggatgaactcaactggattcaccaaagtgtgcggagcgcctccttgtgtcatcggaggggcgggcaacaacaccttgcactgccccaccgattgtttccgcaagcatccggaagccacatactcccggtgcggctccgtccctggattacacccagatgcatggtcgactacccgtataggctttggcattatccttgtaccatcaactataccatatttaaagtcaggatgtacgtgggaggggtcgagcataggctggatgtgcctgcaactggacgcggggcgaacgctgcgatctggaagacagggacaggtccgagctcagcccgttgctgctgtccaccacacagtggcaggtccttccgtgttccttcacgaccttgccggccttgtccaccggcctctccacctccaccagaacatcgtggacgtacagtacctgtacggggtggggtcaagcattgcgtcctgggccattaagtgggagtacgtcgttctcctgttccttctgcttgcagacgcgcgcgtctgtcctgcctgtggatgatgctactcatatcccaagcggaggcggctttggagaacctcgtaacactcaatgcagcatccctggccgggacgcaaggtcttgtatccttcctcgtgttcttctgtttcgcgtggtatctgaaggtaggtgggtgccaggagcggtttacgccctctacgggatgtggcctctcctcctgctcctgttggcgttgccccagcgggcatacgcgctggacacggaggtggccgcgtcgtgtggcggcgttgtctcgtcgggttgatggcgctgactctgtcaccgtattacaagcgctacatcagctggtgcttatggtggctccagtattttctgactagagcagaagcgcaactgcacgtatgggttccccccctcaacgctcgagggggggcgacgctgtcatcttactcatgtgtgttgtacacccgactttggtatttgacatcaccaaactactgctggccgtcctcggacccctttggattcttcaagccagtctgcttaaagtaccctacttgtgcgcgtccagggccttctccggatctgcgcgttagcgcggaagatggttgggggccactacgtgcaaatggttatcatcaagctagggacgcttactggcacctatgtttacaaccatctcactcctcttcgggactggcgcacaacggcctgcgagatctggccgtggctgtagagccagtcgtcttctcccaaatggagaccaagctcatcacatggggggcagacactgccgcgtgcggtgacatcatcaacggcttgcccgttccgcccgtaggggccgggagatactgctcggaccagccgatggaatggtctccaaggggtggaggttgctggcgcccatcacggcgtacgcccagcagacaaggggcctcttaggatgcataatcaccagcctgaccggcgggacaaaaaccaagtggagggtgaagtccagattgtgtcaactgctgcccaaactttcctcgcaacgtgcatcagtggggtatgctggactgtctaccacggggccggaacgaggactattgcatctccaaaggccctgttatccagatgtataccaatgtggacaaagaccttgtgggctggcccgcccctcaaggtgcccgctcattgacgccctgcacctgcggctcctcggacctttacctggtcacgaggcatgccgatgtctccccgtgcgccggcggggtgatagcaggggcagcctgctttcgccccggcccatttcctatttgaaaggttcctcggggggcccgctgttgtgccccgcgggacacgccgtaggcatattcagggcgcggtgtgcacccgtggagtggctaaggcggtggactttatccccgtggagaacctagagacaaccatgaggtccccggtgtttacggacaactcctctccgccagcagtgccccagagcttccaggtggcccacctgcatctcccacgggcagcggcaagagcaccaaggtcccagctgcatatgcggctcagggctataaagtgctagtgctcaacccctctgttgctgcaacactgggctttggtgcttatatgtccaaggcccagggattgatcctaacatcaggaccggggcgagaacaattaccactggcagccccatcacgtactccacctacggcaagttccttgccgacggcgggtgctcggggggcgcctatgatataataatttgtgacgagtgccacccacggatgccacatccatcttgggcatcggcactgtccttgaccaggcagagaccgcgggggcgagactagttgtgctcgccaccgccacccctccgggctccatcactgtgccccatcctaacatgaggaggttgctctgtccaccaccggagagattcctttctatggcaaggctatccccctcgaagtaatcaaaggggggagacatctcattttttgtcactcaaagaagaagtgcgatgagctcgccgcaaagctggtcgcatgggcatcaatgccgtggcctactaccgcggtcttgacgtgtccgtcatcccgaccagcggcgatgttgtcgtcgtggcaactgatgctctcatgaccggttttaccggcgacttcgactcggtgatgactgcaacacgtgtgtcacccagacggtcgatttcagccttgaccctaccttcaccattgagacaaccacgcttccccaagatgctgtctcccgcactcagcgtcggggcaggactggcagggggaagccaggcatctacggtttgtggcaccaggggagcgcccttccggcatgttcgactcgtccatcctctgtgagtgctatgacgcgggttgtgcttggtatgagctcacacccgccgagactacagttagactacgagcgtaatgaacaccccggggcttcccgtgtgccaagaccatctcgaattttgggagggggtcttcacaggcctcactcatatagatgcccacttcctatcccagacaaagcagagtggggagaatcttccttacctggtagcgtacaagccaccgtgtgcgctagggctcaagcccctcccccatcgtgggaccagatgtggaagtgtttgatccgcctcaaacccacccttcatgggccaacacctctgctatacagactgggtgctgtccaaatgaggtcaccctgacgcacccagtcaccaaatatatcatga

SEQ ID NO: 96 - DNA, 4869 bp, Hepatitis C virus
tcgcccacaggacgtcaagttcccgggtggcggtcagatcgttggtggagtttacttgttgccgcgcaggggccctagattgggtgtgcgcgcgacgaggaagacttccgagcggtcgcaacctcgagtagacgtcagcctatccccaaggcgcgtcggcccgagggcaggtcctgggctcagcccgggtacccttggcccctctatggcaatgagggttgcgggtgggcgggatggctcctgtctccccgtggtctcggcctagctggggccccacagacccccggcgtaggtcgcgcaatttgggtaaggtcatcgatacccttacgtgcggcttcgccgacctcatggggtacataccgctcgtcggcgcccctctcggaggcgctgccaggccctggcgcatggcgtcagggttctggaagacggcgtgaactatgcaacagggaatcttcctggttgctctttctctatcttccttctggctctgctctcttgcctgaccgtgcccgcttcagcctacaagtgcgcaactcttcggggctttaccatgtcaccaatgattgccctaactcgagtattgtgtacgaggcggccgatgccattctgcacactccggggtgtgtcccttgtgtttacgagggtaacacctcgaggtgttggtggcggtgacccccacagtggccaccagggacggcaaactccccacgacgcagcttcgacgccacatcgatctgcttgtcgggagtgccaccctctgctcggccctctacgtgggggatctgtgcggtctgtctttcttgtcggccaactgttcaccttctctcccaggcgccaccggacgatgcagaactgcaattgttctatctaccccggccatataacgggccaccgcatggcatgggatatgatgatgaactggtcccctacgtggcattggcggtagctcagctgctccggatcccacaagccatcatggacatgatcgctggtgctcactggggagtcctggcgggcatagcgtatttctccatggtggggaactgggcgaaggtcctgtagtgctgctgctatttgccggcgtcgacgcggagacccacgtcaccgggggagctgccggccgctccacggctgggattgctggtctcttcagcccaggcgccagacagaacatccaactgatcaataccaacggcagtggcacatcaatagcacggccctgaactgcaacgacagcctcaacaccggctggatagcagggctcttctattccaacaaattcaactcttcgggctgtcccgagaggttggccagctgccgacgcctgccgattttgcccagggctggggccccatcagttacgccaacggaagcggccccgacgaacgcccctactgctggcactaccccccaagaccttgtggtattgtgcccgctaagagcgtgtgtggcccggtgtattgcttcctcccagccccgtggtggtgggaacgaccgacaggtcgggcgcgcctacctacaactggggtgaaaatgacacggacgtcttcgtcctcaacaacaccaggccgccgctgggcaattggttcggttgacctggatgaactcaagtggattcaccaaagtgtgcggagcgcccccttgtgtcatcggaggggtgggcaacaacaccttgcgctgccccactgattgcttccgcaaacatccggaagccacatactctcggtgcggctccgtccttggatcacacccaggtgcatggtcgactacccatataggctttggcattatccttgtaccatcaactacaccttattcaaagtcaggatgtacgtgggaggggtcgagcacaggctggaagcgcctgcaactggacgcggggcgaacgctgtgatctggaagacagggacaggtccgagctcagtccgttactgctgtccaccacgcagtggcaggtccttccgtgttcttttacgaccctgccagccttgtccaccggcctctccacctccaccagaacattgtggacgtgcagtacttgtacggggtagggtcaagcatcgcgtcctgggccattaagtgggagtacgtcgttctcctgttccttctgcttgcagacgcgcgcgtctgtcctgcttgtggatgatgttactcatatcccaagcggaggcggctttggagaacctcgtagtactcaatgcagcatccctggccgggacgcacggtcttgtgtccttcctcgtgttcttctgctttgcgtggtatctgaaggtaggtgggcgcccggagcggtctacgccctctacgggatgtggcctctcctcctgctcctgctggcgctgcctcagcgggcatacgcactggacacggaggtggccgcgtcgtgtggcggcgttgtcttgtcgggttgatggcgctgactctgtcaccacattacaagcgcctcatctgctggtgcgtgtggtggcttcagtattttctaaccagagtggaagcgcacctgcacgtgtgggttccccccctcaacgtccgggggggggcgatgccatcatcttactcatgtgtgttatacacccggctctgatatttgacatcaccaaactgctgctggccgtcttcggacccctttggattcttcaagccagtttgctgaaagtcccctacttgtgcgcgttcaaggccttctccgaatctgcgcgctagcgcggaagttagccggaggtcattacgtgcagatggccatcatcaagttaggggcgcttactggcacctatgtctataaccatctcactcctctccgagactggcgcacaacggcctgcaagacctggccgtggctgtagaaccagtcatcttctcccgaatggagaccaaactcatcacgtggggggcagacaccgccgcgtgcggcgacatcatcaacggcttgcccgttccgcccgcaggggccgggagatattgcttggaccagccgacggaatggcctctaaagggtggaggttgctggcgcccatcacagcgtacgcccagcagacgagaggcctcctagggtgcataatcaccagcctgactggcgggataaaaaccaagtggagggtgaggtccagatcgtgtcaactgctacccaaaccttcctggcaacgtgcatcaatggggtatgctggactgtctaccacggggccggaacgaggaccatcgcatccccaggggtcctgttatccagatgtacaccaatgtggaccaggaccttgtgggctggcctgctcctcaaggttcccgctcattgacaccctgcacctgcggctcctcggacctttacctggtcacgaggcacgccgatgtcttcccgtgcgccggcgaggtgatagcaggggcagcttgctctcgccccggcccatttcctacttgaaaggctcctcggggggtccgctgttgtgccccgcgggacacgccgtgggcatatttagggcgcggtgtgcacccgtggtgtggctaaggcggtggacttcatccctgtggagaacctagagacaaccatgagatccccggtgttcacggacaactcttctccaccagcagtgccccagagcttccaggtggctcacctgcatctcccactggcagcggcaagagcaccaaggtcccggctgcgtacgcagctcagggctacaaagtgctagtgctcaacccctctgttgctgcaacattgggctttggtgcttacatgtccaaggctcaggggtcgatcctaatgtcaggacgggggtgcgaacaattaccaccggcagccccatcacgtactccacctacggcaagttccttgccgacggcgggtgctcaggaggtgcttatgacataataatttgtgatgagtgccacccacggatgccacatccatcttgggcatcggcactgtccttgaccaagcagagaccgcgggggcgagactggttgtgctcgccactgctacccctccgggctccgtcaccgtgccccatcctaacatgaggaggttgctctgtccaccaccggagagatccctttttacggcaaggctattcccctcgaggtcatcaaggggggaaggcatctcatcttctgccactcaaagaaaaagtgtgacgagctcgccgcaaagctggtcgcatgggcatcaatgccgtggcctactaccgcggtcttgacgtgtctgtcatcccgaccagcggcgatgttgtcgtcgtggcgaccgatgctctcatgactggctataccggcgacttcgactctgtgatgactgcaacacgtgtgtcacccagacagtcgatttcagccttgaccctaccttcaccattgagacaaccacgctcccccaagacgctgtctcccggactcaacgtcggggcagaaccggcagggggaagccaggcatctacgatttgtggcaccgggggaacgcccctccggcatgttcgactcgtccgtcatctgtgagtgctatgacgcgggctgtgcttggtatgagctcacgcccgccgagactacagttaggctacgagcgtaatgaacaccccggggctccccgtgtgccaggaccatcttgaattttgggagggcgtctttacgggcctcacccatatagatgcccactttctatcccagacaaagcagagtggagagaacttcccttacctggtagcgtacaagccaccgtgtgcgctagggctcaagcccctcccccatcgtgggaccagatgtggaagtgtttgatccgcctcaaacccaccctccatgggccaacacccctgctatacagactgggcgctgttcaaatgaagtcaccctgacgcacccagtcaccaaatacatcatgacatgcatgtcggctga

SEQ ID NO: 97 - DNA, 4869 bp, Hepatitis C virus; identical to SEQ ID NO: 96

SEQ ID NO: 98 - DNA, 4869 bp, Hepatitis C virus; identical to SEQ ID NO: 96

SEQ ID NO: 99 - DNA, 4869 bp, Hepatitis C virus
tcgcccacaggacgtcaagttcccgggtggcggtcagatcgttggtggagtttacttgttgtcgcgcaggggccctagattgggtgtgcgcgcgacgaggaagacttccgagcggtcgcaacctcgagtagacgtcagcctatccccaaggcgcgtcggcccgagggcaggtcctgggctcagcccgggtacccttggcccctctatggcaatgagggttgcgggtgggcgggatggctcctgtctccccgtggtctcggcctagctggggccccacagacccccggcgtaggtcgcgcaatttgggtaaggtcatcgatacccttacgtgcggcttcgccgacctcatggggtacataccgctcgtcggcgcccctctcggaggcgctgccaggccctggcgcatggcgtcagggttctggaagacggcgtgaactatgcaacagggaatcttcctggttgctctttctctatcttccttctggctctgctctcttgcctgaccgtgcccgcttcagcctacaagtgcgcaactcttcggggctttaccatgtcaccaatgattgccctaactcgagtattgtgtacgaggcggccgatgccattctgcacactccggggtgtgtcccttgtgtttacgagggtaacacctcgaggtgttggtggcggtgacccccacagtggccaccagggacggcaaactccccacgacgcagcttcgacgccacatcgatctgcttgtcgggagtgccaccctctgctcggccctctacgtgggggatctgtgcggtctgtctttcttgtcggccaactgttcaccttctctcccaggcgccaccggacgatgcagaactgcaattgttctatctaccccggccatataacgggccaccgcatggcatgggatatgatgatgaactggtcccctacgtggcattggcggtagctcagctgctccggatcccacaagccatcatggacatgatcgctggtgctcactggggagtcctggcgggcatagcgtatttctccatggtggggaactgggcgaaggtcctgtagtgctgctgctatttgccggcgtcgacgcggagacccacgtcaccgggggagctgccggccgctccacggctgggattgctggtctcttcagcccaggcgccagacagaacatccaactgatcaataccaacggcagtggcacatcaatagcacggccctgaactgcaacgacagcctcaacaccggctggatagcagggctcttctattccaacaaattcaactcttcgggctgtcccgagaggttggccagctgccgacgcctgccgattttgcccagggctggggccccatcagttacgccaacggaagcggccccgacgaacgcccctactgctggcactaccccccaagaccttgtggtattgtgcccgctaagagcgtgtgtggcccggtgtattgcttcctcccagccccgtggtggtgggaacgaccgacaggtcgggcgcgcctacctacaactggggtgaaaatgacacggacgtcttcgtcctcaacaacaccaggccgccgctgggcaattggttcggttgacctggatgaactcaagtggattcaccaaagtgtgcggagcgcccccttgtgtcatcggaggggtgggcaacaacaccttgcgctgccccactgattgcttccgcaaacatccggaagccacatactctcggtgcggctccgtccttggatcacacccaggtgcatggtcgactacccatataggctttggcattatccttgtaccatcaactacaccttattcaaagtcaggatgtacgtgggaggggtcgagcacaggctggaagcgcctgcaactggacgcggggcgaacgctgtgatctggaagacagggacaggtccgagctcagtccgttactgctgtccaccacgcagtggcaggtccttccgtgttcttttacgaccctgccagccttgtccaccggcctctccacctccaccagaacattgtggacgtgcagtacttgtacggggtagggtcaagcatcgcgtcctgggccattaagtgggagtacgtcgttctcctgttccttctgcttgcagacgcgcgcgtctgtcctgcttgtggatgatgttactcatatcccaagcggaggcggctttggagaacctcgtagtactcaatgcagcatccctggccgggacgcacggtcttgtgtccttcctcgtgttcttctgctttgcgtggtatctgaaggtaggtgggcgcccggagcggtctacgccctctacgggatgtggcctctcctcctgctcctgctggcgctgcctcagcgggcatacgcactggacacggaggtggccgcgtcgtgtggcggcgttgtcttgtcgggttgatggcgctgactctgtcaccacattacaagcgcctcatctgctggtgcgtgtggtggcttcagtattttctaaccagagtggaagcgcacctgcacgtgtgggttccccccctcaacgtccgggggggggcgatgccatcatcttactcatgtgtgttatacacccggctctgatatttgacatcaccaaactgctgctggccgtcttcggacccctttggattcttcaagccagtttgctgaaagtcccctacttgtgcgcgttcaaggccttctccgaatctgcgcgctagcgcggaagttagccggaggtcattacgtgcagatggccatcatcaagttaggggcgcttactggcacctatgtctataaccatctcactcctctccgagactggcgcacaacggcctgcaagacctggccgtggctgtagaaccagtcatcttctcccgaatggagaccaaactcatcacgtggggggcagacaccgccgcgtgcggcgacatcatcaacggcttgcccgttccgcccgcaggggccgggagatattgcttggaccagccgacggaatggcctctaaagggtggaggttgctggcgcccatcacagcgtacgcccagcagacgagaggcctcctagggtgcataatcaccagcctgactggcgggataaaaaccaagtggagggtgaggtccagatcgtgtcaactgctacccaaaccttcctggcaacgtgcatcaatggggtatgctggactgtctaccacggggccggaacgaggaccatcgcatccccaggggtcctgttatccagatgtacaccaatgtggaccaggaccttgtgggctggcctgctcctcaaggttcccgctcattgacaccctgcacctgcggctcctcggacctttacctggtcacgaggcacgccgatgtcttcccgtgcgccggcgaggtgatagcaggggcagcttgctctcgccccggcccatttcctacttgaaaggctcctcggggggtccgctgttgtgccccgcgggacacgccgtgggcatatttagggcgcggtgtgcacccgtggtgtggctaaggcggtggacttcatccctgtggagaacctagagacaaccatgagatccccggtgttcacggacaactcttctccaccagcagtgccccagagcttccaggtggctcacctgcatctcccactggcagcggcaagagcaccaaggtcccggctgcgtacgcagctcagggctacaaagtgctagtgctcaacccctctgttgctgcaacattgggctttggtgcttacatgtccaaggctcaggggtcgatcctaatgtcaggacgggggtgcgaacaattaccaccggcagccccatcacgtactccacctacggcaagttccttgccgacggcgggtgctcaggaggtgcttatgacataataatttgtgatgagtgccacccacggatgccacatccatcttgggcatcggcactgtccttgaccaagcagagaccgcgggggcgagactggttgtgctcgccactgctacccctccgggctccgtcaccgtgccccatcctaacatgaggaggttgctctgtccaccaccggagagatccctttttacggcaaggctattcccctcgaggtcatcaaggggggaaggcatctcatcttctgccactcaaagaaaaagtgtgacgagctcgccgcaaagctggtcgcatgggcatcaatgccgtggcctactaccgcggtcttgacgtgtctgtcatcccgaccagcggcgatgttgtcgtcgtggcgaccgatgctctcatgactggctataccggcgacttcgactctgtgatgactgcaacacgtgtgtcacccagacagtcgatttcagccttgaccctaccttcaccattgagacaaccacgctcccccaagacgctgtctcccggactcaacgtcggggcagaaccggcagggggaagccaggcatctacgatttgtggcaccgggggaacgcccctccggcatgttcgactcgtccgtcatctgtgagtgctatgacgcgggctgtgcttggtatgagctcacgcccgccgagactacagttaggctacgagcgtaatgaacaccccggggctccccgtgtgccaggaccatcttgaattttgggagggcgtctttacgggcctcacccatatagatgcccactttctatcccagacaaagcagagtggagagaacttcccttacctggtagcgtacaagccaccgtgtgcgctagggctcaagcccctcccccatcgtgggaccagatgtggaagtgtttgatccgcctcaaacccaccctccatgggccaacacccctgctatacagactgggcgctgttcaaatgaagtcaccctgacgcacccagtcaccaaatacatcatgacatgcatgtcggctga

SEQ ID NO: 100 - DNA, 4869 bp, Hepatitis C virus
tcgcccacaggacgtcaagttcccgggtggcggtcagatcgttggtggagtttacttgttgccgcgcaggggccctagattgggtgtgcgcgcgacgaggaagacttccgagcggtcgcaacctcgagtagacgtcagcctatccccaaggcgcgtcggcccgagggcaggtcctgggctcagcccgggtacccttggcccctctatggcaatgagggttgcgggtgggcgggatggctcctgtctccccgtggtctcggcctagctggggccccacagacccccggcgtaggtcgcgcaatttgggtaaggtcatcgatacccttacgtgcggcttcgccgacctcatggggtacataccgctcgtcggcgcccctctcggaggcgctgccaggccctggcgcatggcgtcagggttctggaagacggcgtgaactatgcaacagggaatcttcctggttgctctttctctatcttccttctggctctgctctcttgcctgaccgtgcccgcttcagcctacaagtgcgcaactcttcggggctttaccatgtcaccaatgattgccctaactcgagtattgtgtacgaggcggccgatgccattctgcacactccggggtgtgtcccttgtgtttacgagggtaacacctcgaggtgttggtggcggtgacccccacagtggccaccagggacggcaaactccccacgacgcagcttcgacgccacatcgatctgcttgtcgggagtgccaccctctgctcggccctctacgtgggggatctgtgcggtctgtctttcttgtcggccaactgttcaccttctctcccaggcgccaccggacgatgcagaactgcaattgttctatctaccccggccatataacgggccaccgcatggcatgggatatgatgatgaactggtcccctacgtggcattggcggtagctcagctgctccggatcccacaagccatcatggacatgatcgctggtgctcactggggagtcctggcgggcatagcgtatttctccatggtggggaactgggcgaaggtcctgtagtgctgctgctatttgccggcgtcgacgcggagacccacgtcaccgggggagctgccggccgctccacggctgggattgctggtctcttcagcccaggcgccagacagaacatccaactgatcaataccaacggcagtggcacatcaatagcacggccctgaactgcaacgacagcctcaacaccggctggatagcagggctcttctattccaacaaattcaactcttcgggctgtcccgagaggttggccagctgccgacgcctgccgattttgcccagggctggggccccaccagttacgccaacggaagcggccccgacgaacgcccctactgctggcactaccccccaagaccttgtggtattgtgcccgctaagagcgtgtgtggcccggtgtattgcttcctcccagccccgtggtggtgggaacgaccgacaggtcgggcgcgcctacctacaactggggtgaaaatgacacggacgtcttcgtcctcaacaacaccaggccgccgctgggcaattggttcggttgacctggatgaactcaagtggattcaccaaagtgtgcggagcgcccccttgtgtcatcggaggggtgggcaacaacaccttgcgctgccccactgattgcttccgcaaacatccggaagccacatactctcggtgcggctccgtccttggatcacacccaggtgcatggtcgactacccatataggctttggcattatccttgtaccatcaactacaccttattcaaagtcaggatgtacgtgggaggggtcgagcacaggctggaagcgcctgcaactggacgcggggcgaacgctgtgatctggaagacagggacaggtccgagctcagtccgttactgctgtccaccacgcagtggcaggtccttccgtgttcttttacgaccctgccagccttgtccaccggcctctccacctccaccagaacattgtggacgtgcagtacttgtacggggtagggtcaagcatcgcgtcctgggccattaagtgggagtacgtcgttctcctgttccttctgcttgcagacgcgcgcgtctgtcctgcttgtggatgatgttactcatatcccaagcggaggcggctttggagaacctcgtagtactcaatgcagcatccctggccgggacgcacggtcttgtgtccttcctcgtgttcttctgctttgcgtggtatctgaaggtaggtgggcgcccggagcggtctacgccctctacgggatgtggcctctcctcctgctcctgctggcgctgcctcagcgggcatacgcactggacacggaggtggccgcgtcgtgtggcggcgttgtcttgtcgggttgatggcgctgactctgtcaccacattacaagcgcctcatctgctggtgcgtgtggtggcttcagtattttctaaccagagtggaagcgcacctgcacgtgtgggttccccccctcaacgtccgggggggggcgatgccatcatcttactcatgtgtgttatacacccggctctgatatttgacatcaccaaactgctgctggccgtcttcggacccctttggattcttcaagccagtttgctgaaagtcccctacttgtgcgcgttcaaggccttctccgaatctgcgcgctagcgcggaagttagccggaggtcattacgtgcagatggccatcatcaagttaggggcgcttactggcacctatgtctataaccatctcactcctctccgagactggcgcacaacggcctgcaagacctggccgtggctgtagaaccagtcatcttctcccgaatggagaccaaactcatcacgtggggggcagacaccgccgcgtgcggcgacatcatcaacggcttgcccgttccgcccgcaggggccgggagatattgcttggaccagccgacggaatggcctctaaagggtggaggttgctggcgcccatcacagcgtacgcccagcagacgagaggcctcctagggtgcataatcaccagcctgactggcgggataaaaaccaagtggagggtgaggtccagatcgtgtcaactgctacccaaaccttcctggcaacgtgcatcaatggggtatgctggactgtctaccacggggccggaacgaggaccatcgcatccccaggggtcctgttatccagatgtacaccaatgtggaccaggaccttgtgggctggcctgctcctcaaggttcccgctcattgacaccctgcacctgcggctcctcggacctttacctggtcacgaggcacgccgatgtcttcccgtgcgccggcgaggtgatagcaggggcagcttgctctcgccccggcccatttcctacttgaaaggctcctcggggggtccgctgttgtgccccgcgggacacgccgtgggcatatttagggcgcggtgtgcacccgtggtgtggctaaggcggtggacttcatccctgtggagaacctagagacaaccatgagatccccggtgttcacggacaactcttctccaccagcagtgccccagagcttccaggtggctcacctgcatctcccactggcagcggcaagagcaccaaggtcccggctgcgtacgcagctcagggctacaaagtgctagtgctcaacccctctgttgctgcaacattgggctttggtgcttacatgtccaaggctcaggggtcgatcctaatgtcaggacgggggtgcgaacaattaccaccggcagccccatcacgtactccacctacggcaagttccttgccgacggcgggtgctcaggaggtgcttatgacataataatttgtgatgagtgccacccacggatgccacatccatcttgggcatcggcactgtccttgaccaagcagagaccgcgggggcgagactggttgtgctcgccactgctacccctccgggctccgtcaccgtgccccatcctaacatgaggaggttgctctgtccaccaccggagagatccctttttacggcaaggctattcccctcgaggtcatcaaggggggaaggcatctcatcttctgccactcaaagaaaaagtgtgacgagctcgccgcaaagctggtcgcatgggcatcaatgccgtggcctactaccgcggtcttgacgtgtctgtcatcccgaccagcggcgatgttgtcgtcgtggcgaccgatgctctcatgactggctataccggcgacttcgactctgtgatgactgcaacacgtgtgtcacccagacagtcgatttcagccttgaccctaccttcaccattgagacaaccacgctcccccaagacgctgtctcccggactcaacgtcggggcagaaccggcagggggaagccaggcatctacgatttgtggcaccgggggaacgcccctccggcatgttcgactcgtccgtcatctgtgagtgctatgacgcgggctgtgcttggtatgagctcacgcccgccgagactacagttaggctacgagcgtaatgaacaccccggggctccccgtgtgccaggaccatcttgaattttgggagggcgtctttacgggcctcacccatatagatgcccactttctatcccagacaaagcagagtggagagaacttcccttacctggtagcgtacaagccaccgtgtgcgctagggctcaagcccctcccccatcgtgggaccagatgtggaagtgtttgatccgcctcaaacccaccctccatgggccaacacccctgctatacagactgggcgctgttcaaatgaagtcaccctgacgcacccagtcaccaaatacatcatgacatgcatgtcggctga

SEQ ID NO: 101 - DNA, 4869 bp, Hepatitis C virus
tcgcccacaggacgtcaagttcccgggtggcggtcagatcgttggtggagtttacttgttgccgcgcaggggccctagattgggtgtgcgcgcgacgaggaagacttccgagcggtcgcaacctcgagtagacgtcagcctatccccaaggcgcgtcggcccgagggcaggtcctgggctcagcccgggtacccttggcccctctatggcaatgagggttgcgggtgggcgggatggctcctgtctccccgtggtctcggcctagctggggccccacagacccccggcgtaggtcgcgcaatttgggtaaggtcatcgatacccttacgtgcggcttcgccgacctcatggggtacataccgctcgtcggcgcccctctcggaggcgctgccaggccctggcgcatggcgtcagggttctggaagacggcgtgaactatgcaacagggaatcttcctggttgctctttctctatcttccttctggctctgctctcttgcctgaccgtgcccgcttcagcctacaagtgcgcaactcttcggggctttaccatgtcaccaatgattgccctaactcgagtattgtgtacgaggcggccgatgccattctgcacactccggggtgtgtcccttgtgtttacgagggtaacacctcgaggtgttggtggcggtgacccccacagtggccaccagggacggcaaactccccacgacgcagcttcgacgccacatcgatctgcttgtcgggagtgccaccctctgctcggccctctacgtgggggatctgtgcggtctgtctttcttgtcggccaactgttcaccttctctcccaggcgccaccggacgatgcagaactgcaattgttctatctaccccggccatataacgggccaccgcatggcatgggatatgatgatgaactggtcccctacgtggcattggcggtagctcagctgctccggatcccacaagccatcatggacatgatcgctggtgctcactggggagtcctggcgggcatagcgtatttctccatggtggggaactgggcgaaggtcctgtagtgctgctgctatttgccggcgtcgacgcggagacccacgtcaccgggggagctgccggccgctccacggctgggattgctggtctcttcagcccaggcgccagacagaacatccaactgatcaataccaacggcagtggcacatcaatagcacggccctgaactgcaacgacagcctcaacaccggctggatagcagggctcttctattccaacaaattcaactcttcgggctgtcccgagaggttggccagctgccgacgcctgccgattttgcccagggctggggccccatcagttacgccaacggaagcggccccgacgaacgcccctactgctggcactaccccccaagaccttgtggtattgtgcccgctaagagcgtgtgtggcccggtgtattgcttcctcccagccccgtggtggtgggaacgaccgacaggtcgggcgcgcctacctacaactggggtgaaaatgacacggacgtcttcgtcctcaacaacaccaggccgccgctgggcaattggttcggttgacctggatgaactcaagtggattcactaaagtgtgcggagcgcccccttgtgtcatcggaggggtgggcaacaacaccttgcgctgccccactgattgcttccgcaaacatccggaagccacatactctcggtgcggctccgtccttggatcacacccaggtgcatggtcgactacccatataggctttggcattatccttgtaccatcaactacaccttattcaaagtcaggatgtacgtgggaggggtcgagcacaggctggaagcgcctgcaactggacgcggggcgaacgctgtgatctggaagacagggacaggtccgagctcagtccgttactgctgtccaccacgcagtggcaggtccttccgtgttcttttacgaccctgccagccttgtccaccggcctctccacctccaccagaacattgtggacgtgcagtacttgtacggggtagggtcaagcatcgcgtcctgggccattaagtgggagtacgtcgttctcctgttccttctgcttgcagacgcgcgcgtctgtcctgcttgtggatgatgttactcatatcccaagcggaggcggctttggagaacctcgtagtactcaatgcagcatccctggccgggacgcacggtcttgtgtccttcctcgtgttcttctgctttgcgtggtatctgaaggtaggtgggcgcccggagcggtctacgccctctacgggatgtggcctctcctcctgctcctgctggcgctgcctcagcgggcatacgcactggacacggaggtggccgcgtcgtgtggcggcgttgtcttgtcgggttgatggcgctgactctgtcaccacattacaagcgcctcatctgctggtgcgtgtggtggcttcagtattttctaaccagagtggaagcgcacctgcacgtgtgggttccccccctcaacgtccgggggggggcgatgccatcatcttactcatgtgtgttatacacccggctctgatatttgacatcaccaaactgctgctggccgtcttcggacccctttggattcttcaagccagtttgctgaaagtcccctacttgtgcgcgttcaaggccttctccgaatctgcgcgctagcgcggaagttagccggaggtcattacgtgcagatggccatcatcaagttaggggcgcttactggcacctatgtctataaccatctcactcctctccgagactggcgcacaacggcctgcaagacctggccgtggctgtagaaccagtcatcttctcccgaatggagaccaaactcatcacgtggggggcagacaccgccgcgtgcggcgacatcatcaacggcttgcccgttccgcccgcaggggccgggagatattgcttggaccagccgacggaatggcctctaaagggtggaggttgctggcgcccatcacagcgtacgcccagcagacgagaggcctcctagggtgcataatcaccagcctgactggcgggataaaaaccaagtggagggtgaggtccagatcgtgtcaactgctacccaaaccttcctggcaacgtgcatcaatggggtatgctggactgtctaccacggggccggaacgaggaccatcgcatccccaggggtcctgttatccagatgtacaccaatgtggaccaggaccttgtgggctggcctgctcctcaaggttcccgctcattgacaccctgcacctgcggctcctcggacctttacctggtcacgaggcacgccgatgtcttcccgtgcgccggcgaggtgatagcaggggcagcttgctctcgccccggcccatttcctacttgaaaggctcctcggggggtccgctgttgtgccccgcgggacacgccgtgggcatatttagggcgcggtgtgcacccgtggtgtggctaaggcggtggacttcatccctgtggagaacctagagacaaccatgagatccccggtgttcacggacaactcttctccaccagcagtgccccagagcttccaggtggctcacctgcatctcccactggcagcggcaagagcaccaaggtcccggctgcgtacgcagctcagggctacaaagtgctagtgctcaacccctctgttgctgcaacattgggctttggtgcttacatgtccaaggctcaggggtcgatcctaatgtcaggacgggggtgcgaacaattaccaccggcagccccatcacgtactccacctacggcaagttccttgccgacggcgggtgctcaggaggtgcttatgacataataatttgtgatgagtgccacccacggatgccacatccatcttgggcatcggcactgtccttgaccaagcagagaccgcgggggcgagactggttgtgctcgccactgctacccctccgggctccgtcaccgtgccccatcctaacatgaggaggttgctctgtccaccaccggagagatccctttttacggcaaggctattcccctcgaggtcatcaaggggggaaggcatctcatcttctgccactcaaagaaaaagtgtgacgagctcgccgcaaagctggtcgcatgggcatcaatgccgtggcctactaccgcggtcttgacgtgtctgtcatcccgaccagcggcgatgttgtcgtcgtggcgaccgatgctctcatgactggctataccggcgacttcgactctgtgatgactgcaacacgtgtgtcacccagacagtcgatttcagccttgaccctaccttcaccattgagacaaccacgctcccccaagacgctgtctcccggactcaacgtcggggcagaaccggcagggggaagccaggcatctacgatttgtggcaccgggggaacgcccctccggcatgttcgactcgtccgtcatctgtgagtgctatgacgcgggctgtgcttggtatgagctcacgcccgccgagactacagttaggctacgagcgtaatgaacaccccggggctccccgtgtgccaggaccatcttgaattttgggagggcgtctttacgggcctcacccatatagatgcccactttctatcccagacaaagcagagtggagagaacttcccttacctggtagcgtacaagccaccgtgtgcgctagggctcaagcccctcccccatcgtgggaccagatgtggaagtgtttgatccgcctcaaacccaccctccatgggccaacacccctgctatacagactgggcgctgttcaaatgaagtcaccctgacgcacccagtcaccaaatacatcatgacatgcatgtcggctga

SEQ ID NO: 102 - DNA, 4869 bp, Hepatitis C virus
tcgcccacaggacgtcaagttcccgggtggcggtcagatcgttggtggagtttacttgttgccgcgcaggggccctagattgggtgtgcgcgcgacgaggaagacttccgagcggtcgcaacctcgagtagacgtcagcctatccccaaggcgcgtcggcccgagggcaggtcctgggctcagcccgggtacccttggcccctctatggcaatgagggttgcgggtgggcgggatggctcctgtctccccgtggtctcggcctagctggggccccacagacccccggcgtaggtcgcgcaatttgggtaaggtcatcgatacccttacgtgcggcttcgccgacctcatggggtacataccgctcgtcggcgcccctctcggaggcgctgccaggccctggcgcatggcgtcagggttctggaagacggcgtgaactatgcaacagggaatcttcctggttgctctttctctatcttccttctggctctgctctcttgcctgaccgtgcccgcttcagcctacaagtgcgcaactcttcggggctttaccatgtcaccaatgattgccctaactcgagtattgtgtacgaggcggccgatgccattctgcacactccggggtgtgtcccttgtgtttacgagggtaacacctcgaggtgttggtggcggtgacccccacagtggccaccagggacggcaaactccccacgacgcagcttcgacgccacatcgatctgcttgtcgggagtgccaccctctgctcggccctctacgtgggggatctgtgcggtctgtctttcttgtcggccaactgttcaccttctctcccaggcgccaccggacgatgcagaactgcaattgttctatctaccccggccatataacgggccaccgcatggcatgggatatgatgatgaactggtcccctacgtggcattggcggtagctcagctgctccggatcccacaagccatcatggacatgatcgctggtgctcactggggagtcctggcgggcatagcgtatttctccatggtggggaactgggcgaaggtcctgtagtgctgctgctatttgccggcgtcgacgcggagacccacgtcaccgggggagctgccggccgctccacggctgggattgctggtctcttcagcccaggcgccagacagaacatccaactgatcaataccaacggcagtggcacatcaatagcacggccctgaactgcaacgacagcctcaacaccggctggatagcagggctcttctattccaacaaattcaactcttcgggctgtcccgagaggttggccagctgccgacgcctgccgattttgcccagggctggggccccatcagttacgccaacggaagcggccccgacgaacgcccctactgctggcactaccccccaagaccttgtggtattgtgcccgctaagagcgtgtgtggcccggtgtattgcttcctcccagccccgtggtggtgggaacgaccgacaggtcgggcgcgcctacctacaactggggtgaaaatgacacggacgtcttcgtcctcaacaacaccaggccgccgctgggcaattggttcggttgacctggatgaactcaagtggattcaccaaagtgtgcggagcgcccccttgtgtcatcggaggggtgggcaacaacaccttgcgctgccccactgattgcttccgcaaacatccggaagccacatactctcggtgcggctccgtccttggatcacacccaggtgcatggtcgactacccatataggctttggcattatccttgtaccatcaactacaccttattcaaagtcaggatgtacgtgggaggggtcgagcacaggctggaagcgcctgcaactggacgcggggcgaacgctgtgatctggaagacagggacaggtccgagctcagtccgttactgctgtccaccacgcagtggcaggtccttccgtgttcttttacgaccctgccagccttgtccaccggcctctccacctccaccagaacattgtggacgtgcagtacttgtacggggtagggtcaagcatcgcgtcctgggccattaagtgggagtacgtcgttctcctgttccttctgcttgcagacgcgcgcgtctgtcctgcttgtggatgatgttactcatatcccaagcggaggcggctttggagaacctcgtagtactcaatgcagcatccctggccgggacgcacggtcttgtgtccttcctcgtgttcttctgctttgcgtggtatctgaaggtaggtgggcgcccggagcggtctacgccctctacgggatgtggcctctcctcctgctcctgctggcgctgcctcagcgggcatacgcactggacacggaggtggccgcgtcgtgtggcggcgttgtcttgtcgggttgatggcgctgactctgtcaccacattacaagcgcctcatctgctggtgcgtgtggtggcttcagtattttctaaccagagtggaagcgcacctgcacgtgtgggttccccccctcaacgtccgggggggggcgatgccatcatcttactcatgtgtgttatacacccggctctgatatttgacatcaccaaactgctgctggccgtcttcggacccctttggattcttcaagccagcttgctgaaagtcccctacttgtgcgcgttcaaggccttctccgaatctgcgcgctagcgcggaagttagccggaggtcattacgtgcagatggccatcatcaagttaggggcgcttactggcacctatgtctataaccatctcactcctctccgagactggcgcacaacggcctgcaagacctggccgtggctgtagaaccagtcatcttctcccgaatggagaccaaactcatcacgtggggggcagacaccgccgcgtgcggcgacatcatcaacggcttgcccgttccgcccgcaggggccgggagatattgcttggaccagccgacggaatggcctctaaagggtggaggttgctggcgcccatcacagcgtacgcccagcagacgagaggcctcctagggtgcataatcaccagcctgactggcgggataaaaaccaagtggagggtgaggtccagatcgtgtcaactgctacccaaaccttcctggcaacgtgcatcaatggggtatgctggactgtctaccacggggccggaacgaggaccatcgcatccccaggggtcctgttatccagatgtacaccaatgtggaccaggaccttgtgggctggcctgctcctcaaggttcccgctcattgacaccctgcacctgcggctcctcggacctttacctggtcacgaggcacgccgatgtcttcccgtgcgccggcgaggtgatagcaggggcagcttgctctcgccccggcccatttcctacttgaaaggctcctcggggggtccgctgttgtgccccgcgggacacgccgtgggcatatttagggcgcggtgtgcacccgtggtgtggctaaggcggtggacttcatccctgtggagaacctagagacaaccatgagatccccggtgttcacggacaactcttctccaccagcagtgccccagagcttccaggtggctcacctgcatctcccactggcagcggcaagagcaccaaggtcccggctgcgtacgcagctcagggctacaaagtgctagtgctcaacccctctgttgctgcaacattgggctttggtgcttacatgtccaaggctcaggggtcgatcctaatgtcaggacgggggtgcgaacaattaccaccggcagccccatcacgtactccacctacggcaagttccttgccgacggcgggtgctcaggaggtgcttatgacataataatttgtgatgagtgccacccacggatgccacatccatcttgggcatcggcactgtccttgaccaagcagagaccgcgggggcgagactggttgtgctcgccactgctacccctccgggctccgtcaccgtgccccatcctaacatgaggaggttgctctgtccaccaccggagagatccctttttacggcaaggctattcccctcgaggtcatcaaggggggaaggcatctcatcttctgccactcaaagaaaaagtgtgacgagctcgccgcaaagctggtcgcatgggcatcaatgccgtggcctactaccgcggtcttgacgtgtctgtcatcccgaccagcggcgatgttgtcgtcgtggcgaccgatgctctcatgactggctataccggcgacttcgactctgtgatgactgcaacacgtgtgtcacccagacagtcgatttcagccttgaccctaccttcaccattgagacaaccacgctcccccaagacgctgtctcccggactcaacgtcggggcagaaccggcagggggaagccaggcatctacgatttgtggcaccgggggaacgcccctccggcatgttcgactcgtccgtcatctgtgagtgctatgacgcgggctgtgcttggtatgagctcacgcccgccgagactacagttaggctacgagcgtaatgaacaccccggggctccccgtgtgccaggaccatcttgaattttgggagggcgtctttacgggcctcacccatatagatgcccactttctatcccagacaaagcagagtggagagaacttcccttacctggtagcgtacaagccaccgtgtgcgctagggctcaagcccctcccccatcgtgggaccagatgtggaagtgcttgatccgcctcaaacccaccctccatgggccaacacccctgctatacagactgggcgctgttcaaatgaagtcaccctgacgcacccagtcaccaaatacatcatgacatgcatgtcggctga

SEQ ID NO: 103 - DNA, 4869 bp, Hepatitis C virus
tcgcccacaggacgtcaagttcccgggtggcggtcagatcgttggtggagtttacttgttgccgcgcaggggccctagattgggtgtgcgcgcgacgaggaagacttccgagcggtcgcaacctcgagtagacgtcagcctatccccaaggcgcgtcggcccgagggcaggtcctgggctcagcccgggtacccttggcccctctatggcaatgagggttgcgggtgggcgggatggctcctgtctccccgtggtctcggcctagctggggccccacagacccccggcgtaggtcgcgcaatttgggtaaggtcatcgatacccttacgtgcggcttcgccgacctcatggggtacataccgctcgtcggcgcccctctcggaggcgctgccaggccctggcgcatggcgtcagggttctggaagacggcgtgaactatgcaacagggaatcttcctggttgctctttctctatcttccttctggctctgctctcttgcctgaccgtgcccgcttcagcctacaagtgcgcaactcttcggggctttaccatgtcaccaatgattgccctaactcgagtattgtgtacgaggcggccgatgccattctgcacactccggggtgtgtcccttgtgtttacgagggtaacacctcgaggtgttggtggcggtgacccccacagtggccaccagggacggcaaactccccacgacgcagcttcgacgccacatcgatctgcttgtcgggagtgccaccctctgctcggccctctacgtgggggatctgtgcggtctgtctttcttgtcggccaactgttcaccttctctcccaggcgccaccggacgatgcagaactgcaattgttctatctaccccggccatataacgggccaccgcatggcatgggatatgatgatgaactggtcccctacgtggcattggcggtagctcagctgctccggatcccacaagccatcatggacatgatcgctggtgctcactggggagtcctggcgggcatagcgtatttctccatggtggggaactgggcgaaggtcctgtagtgctgctgctatttgccggcgtcgacgcggagacccacgtcaccgggggagctgccggccgctccacggctgggattgctggtctcttcagcccaggcgccagacagaacatccaactgatcaataccaacggcagtggcacatcaatagcacggccctgaactgcaacgacagcctcaacaccggctggatagcagggctcttctattccaacaaattcaactcttcgggctgtcccgagaggttggccagctgccgacgcctgccgattttgcccagggctggggccccatcagttacgccaacggaagcggccccgacgaacgcccctactgctggcactaccccccaagaccttgtggtattgtgcccgctaagagcgtgtgtggcccggtgtattgcttcctcccagccccgtggtggtgggaacgaccgacaggtcgggcgcgcctacctacaactggggtgaaaatgacacggacgtcttcgtcctcaacaacaccaggccgccgctgggcaattggttcggttgacctggatgaactcaagtggattcaccaaagtgtgcggagcgcccccttgtgtcatcggaggggtgggcaacaacaccttgcgctgccccactgattgcttccgcaaacatccggaagccacatactctcggtgcggctccgtccttggatcacacccaggtgcatggtcgactacccatataggctttggcattatccttgtaccatcaactacaccttattcaaagtcaggatgtacgtgggaggggtcgagcacaggctggaagcgcctgcaactggacgcggggcgaacgctgtgatctggaagacagggacaggtccgagctcagtccgttactgctgtccaccacgcagtggcaggtccttccgtgttcttttacgaccctgccagccttgtccaccggcctctccacctccaccagaacattgtggacgtgcagtacttgtacggggtagggtcaagcatcgcgtcctgggccattaagtgggagtacgtcgttctcctgttccttctgcttgcagacgcgcgcgtctgtcctgcttgtggatgatgttactcatatcccaagcggaggcggctttggagaacctcgtagtactcaatgcagcatccctggccgggacgcacggtcttgtgtccttcctcgtgttcttctgctttgcgtggtatctgaaggtaggtgggcgcccggagcggtctacgccctctacgggatgtggcctctcctcctgctcctgctggcgctgcctcagcgggcatacgcactggacacggaggtggccgcgtcgtgtggcggcgttgtcttgtcgggttgatggcgctgactctgtcaccacattacaagcgcctcatctgctggtgcgtgtggtggcttcagtattttctaaccagagtggaagcgcacctgcacgtgtgggttccccccctcaacgtccgggggggggcgatgccatcatcttactcatgtgtgttatacacccggctctgatatttgacatcaccaaactgctgctggccgtcttcggacccctttggattcttcaagccagtttgctgaaagtcccctacttgtgcgcgttcaaggccttctccgaatctgcgcgctagcgcggaagttagccggaggtcattacgtgcagatggccatcatcaagttaggggcgcttactggcacctatgtctataaccatctcactcctctccgagactggcgcacaacggcctgcaagacctggccgtggctgtagaaccagtcatcttctcccgaatggagaccaaactcatcacgtggggggcagacactgccgcgtgcggcgacatcatcaacggcttgcccgttccgcccgcaggggccgggagatattgcttggaccagccgacggaatggcctctaaagggtggaggttgctggcgcccatcacagcgtacgcccagcagacgagaggcctcctagggtgcataatcaccagcctgactggcgggataaaaaccaagtggagggtgaggtccagatcgtgtcaactgctacccaaaccttcctggcaacgtgcatcaatggggtatgctggactgtctaccacggggccggaacgaggaccatcgcatccccaggggtcctgttatccagatgtacaccaatgtggaccaggaccttgtgggctggcctgctcctcaaggttcccgctcattgacaccctgcacctgcggctcctcggacctttacctggtcacgaggcacgccgatgtcttcccgtgcgccggcgaggtgatagcaggggcagcttgctctcgccccggcccatttcctacttgaaaggctcctcggggggtccgctgttgtgccccgcgggacacgccgtgggcatatttagggcgcggtgtgcacccgtggtgtggctaaggcggtggacttcatccctgtggagaacctagagacaaccatgagatccccggtgttcacggacaactcttctccaccagcagtgccccagagcttccaggtggctcacctgcatctcccactggcagcggcaagagcaccaaggtcccggctgcgtacgcagctcagggctacaaagtgctagtgctcaacccctctgttgctgcaacattgggctttggtgcttacatgtccaaggctcaggggtcgatcctaatgtcaggacgggggtgcgaacaattaccaccggcagccccatcacgtactccacctacggcaagttccttgccgacggcgggtgctcaggaggtgcttatgacataataatttgtgatgagtgccacccacggatgccacatccatcttgggcatcggcactgtccttgaccaagcagagaccgcgggggcgagactggttgtgctcgccactgctacccctccgggctccgtcaccgtgccccatcctaacatgaggaggttgctctgtccaccaccggagagatccctttttacggcaaggctattcccctcgaggtcatcaaggggggaaggcatctcatcttctgccactcaaagaaaaagtgtgacgagctcgccgcaaagctggtcgcatgggcatcaatgccgtggcctactaccgcggtcttgacgtgtctgtcatcccgaccagcggcgatgttgtcgtcgtggcgaccgatgctctcatgactggctataccggcgacttcgactctgtgatgactgcaacacgtgtgtcacccagacagtcgatttcagccttgaccctaccttcaccattgagacaaccacgctcccccaagacgctgtctcccggactcaacgtcggggcagaaccggcagggggaagccaggcatctacgatttgtggcaccgggggaacgcccctccggcatgttcgactcgtccgtcatctgtgagtgctatgacgcgggctgtgcttggtatgagctcacgcccgccgagactacagttaggctacgagcgtaatgaacaccccggggctccccgtgtgccaggaccatcttgaattttgggagggcgtctttacgggcctcacccatatagatgcccactttctatcccagacaaagcagagtggagagaacttcccttacctggtagcgtacaagccaccgtgtgcgctagggctcaagcccctcccccatcgtgggaccagatgtggaagtgtttgatccgcctcaaacccaccctccatgggccaacacccctgctatacagactgggcgctgttcaaatgaagtcaccctgacgcacccagtcaccaaatacatcatgacatgcatgtcggctga

SEQ ID NO: 104 - DNA, 4869 bp, Hepatitis C virus
tcgcccacaggacgtcaagttcccgggtggcggtcagatcgttggtggagtttacttgttgccgcgcaggggccctagattgggtgtgcgcgcgacgaggaagacttccgagcggtcgcaacctcgagtagacgtcagcctatccccaaggcgcgtcggcccgagggcaggtcctgggctcagcccgggtacccttggcccctctatggcaatgagggttgcgggtgggcgggatggctcctgtctccccgtggtctcggcctagctggggccccacagacccccggcgtaggtcgcgcaatttgggtaaggtcatcgatacccttacgtgcggcttcgccgacctcatggggtacataccgctcgtcggcgcccctctcggaggcgctgccaggccctggcgcatggcgtcagggttctggaagacggcgtgaactatgcaacagggaatcttcctggttgctctttctctatcttccttctggctctgctctcttgcctgaccgtgcccgcttcagcctacaagtgcgcaactcttcggggctttaccatgtcaccaatgattgccctaactcgagtattgtgtacgaggcggccgatgccattctgcacactccggggtgtgtcccttgtgtttacgagggtaacacctcgaggtgttggtggcggtgacccccacagtggccaccagggacggcaaactccccacgacgcagcttcgacgccacatcgatctgcttgtcgggagtgccaccctctgctcggccctctacgtgggggatctgtgcggtctgtctttcttgtcggccaactgttcaccttctctcccaggcgccaccggacgatgcagaactgcaattgttctatctaccccggccatataacgggccaccgcatggcatgggatatgatgatgaactggtcccctacgtggcattggcggtagctcagctgctccggatcccacaagccatcatggacatgatcgctggtgctcactggggagtcctggcgggcatagcgtatttctccatggtggggaactgggcgaaggtcctgtagtgctgctgctatttgccggcgtcgacgcggagacccacgtcaccgggggagctgccggccgctccacggctgggattgctggtctcttcagcccaggcgccagacagaacatccaactgatcaataccaacggcagtggcacatcaatagcacggccctgaactgcaacgacagcctcaacaccggctggatagcagggctcttctattccaacaaattcaactcttcgggctgtcccgagaggttggccagctgccgacgcctgccgattttgcccagggctggggccccatcagttacgccaacggaagcggccccgacgaacgcccctactgctggcactaccccccaagaccttgtggtattgtgcccgctaagagcgtgtgtggcccggtgtattgcttcctcccagccccgtggtggtgggaacgaccgacaggtcgggcgcgcctacctacaactggggtgaaaatgacacggacgtcttcgtcctcaacaacaccaggccgccgctgggcaattggttcggttgacctggatgaactcaagtggattcaccaaagtgtgcggagcgcccccttgtgtcatcggaggggtgggcaacaacaccttgcgctgccccactgattgcttccgcaaacatccggaagccacatactctcggtgcggctccgtccttggatcacacccaggtgcatggccgactacccatataggctttggcattatccttgtaccatcaactacaccttattcaaagtcaggatgtacgtgggaggggtcgagcacaggctggaagcgcctgcaactggacgcggggcgaacgctgtgatctggaagacagggacaggtccgagctcagtccgttactgctgtccaccacgcagtggcaggtccttccgtgttcttttacgaccctgccagccttgtccaccggcctctccacctccaccagaacattgtggacgtgcagtacttgtacggggtagggtcaagcatcgcgtcctgggccattaagtgggagtacgtcgttctcctgttccttctgcttgcagacgcgcgcgtctgtcctgcttgtggatgatgttactcatatcccaagcggaggcggctttggagaacctcgtagtactcaatgcagcatccctggccgggacgcacggtcttgtgtccttcctcgtgttcttctgctttgcgtggtatctgaaggtaggtgggcgcccggagcggtctacgccctctacgggatgtggcctctcctcctgctcctgctggcgctgcctcagcgggcatacgcactggacacggaggtggccgcgtcgtgtggcggcgttgtcttgtcgggttgatggcgctgactctgtcaccacattacaagcgcctcatctgctggtgcgtgtggtggcttcagtattttctaaccagagtggaagcgcacctgcacgtgtgggttccccccctcaacgtccgggggggggcgatgccatcatcttactcatgtgtgttatacacccggctctgatatttgacatcaccaaactgctgctggccgtcttcggacccctttggattcttcaagccagtttgctgaaagtcccctacttgtgcgcgttcaaggccttctccgaatctgcgcgctagcgcggaagttagccggaggtcattacgtgcagatggccatcatcaagttaggggcgcttactggcacctatgtctataaccatctcactcctctccgagactggcgcacaacggcctgcaagacctggccgtggctgtagaaccagtcatcttctcccgaatggagaccaaactcatcacgtggggggcagacaccgccgcgtgcggcgacatcatcaacggcttgcccgttccgcccgcaggggccgggagatattgcttggaccagccgacggaatggcctctaaagggtggaggttgctggcgcccatcacagcgtacgcccagcagacgagaggcctcctagggtgcataatcaccagcctgactggcgggataaaaaccaagtggagggtgaggtccagatcgtgtcaactgctacccaaaccttcctggcaacgtgcatcaatggggtatgctggactgtctaccacggggccggaacgaggaccatcgcatccccaggggtcctgttatccagatgtacaccaatgtggaccaggaccttgtgggctggcctgctcctcaaggttcccgctcattgacaccctgcacctgcggctcctcggacctttacctggtcacgaggcacgccgatgtcttcccgtgcgccggcgaggtgatagcaggggcagcttgctctcgccccggcccatttcctacttgaaaggctcctcggggggtccgctgttgtgccccgcgggacacgccgtgggcatatttagggcgcggtgtgcactcgtggtgtggctaaggcggtggacttcatccctgtggagaacctagagacaaccatgagatccccggtgttcacggacaactcttctccaccagcagtgccccagagcttccaggtggctcacctgcatctcccactggcagcggcaagagcaccaaggtcccggctgcgtacgcagctcagggctacaaagtgctagtgctcaacccctctgttgctgcaacattgggctttggtgcttacatgtccaaggctcaggggtcgatcctaatgtcaggacgggggtgcgaacaattaccaccggcagccccatcacgtactccacctacggcaagttccttgccgacggcgggtgctcaggaggtgcttatgacataataatttgtgatgagtgccacccacggatgccacatccatcttgggcatcggcactgtccttgaccaagcagagaccgcgggggcgagactggttgtgctcgccactgctacccctccgggctccgtcaccgtgccccatcctaacatgaggaggttgctctgtccaccaccggagagatccctttttacggcaaggctattcccctcgaggtcatcaaggggggaaggcatctcatcttctgccactcaaagaaaaagtgtgacgagctcgccgcaaagctggtcgcatgggcatcaatgccgtggcctactaccgcggtcttgacgtgtctgtcatcccgaccagcggcgatgttgtcgtcgtggcgaccgatgctctcatgactggctataccggcgacttcgactctgtgatgactgcaacacgtgtgtcacccagacagtcgatttcagccttgaccctaccttcaccattgagacaaccacgctcccccaagacgctgtctcccggactcaacgtcggggcagaaccggcagggggaagccaggcatctacgatttgtggcaccgggggaacgcccctccggcatgttcgactcgtccgtcatctgtgagtgctatgacgcgggctgtgcttggtatgagctcacgcccgccgagactacagttaggctacgagcgtaatgaacaccccggggctccccgtgtgccaggaccatcttgaattttgggagggcgtctttacgggcctcacccatatagatgcccactttctatcccagacaaagcagagtggagagaacttcccttacctggtagcgtacaagccaccgtgtgcgctagggctcaagcccctcccccatcgtgggaccagatgtggaagtgtttgatccgcctcaaacccaccctccatgggccaacacccctgctatacagactgggcgctgttcaaatgaagtcaccctgacgcacccagtcaccaaatacatcatgacatgcatgtcggctga

SEQ ID NO: 105 - DNA, 4869 bp, Hepatitis C virus
tcgcccacaggacgtcaagttcccgggtggcggtcagatcgttggtggagtttacttgttgccgcgcaggggccctagattgggtgtgcgcgcgacgaggaagacttccgagcggtcgcaacctcgagtagacgtcagcctatccccaaggcgcgtcggcccgagggcaggtcctgggctcagcccgggtacccttggcccctctatggcaatgagggttgcgggtgggcgggatggctcctgtctccccgtggtctcggcctagctggggccccacagacccccggcgtaggtcgcgcaatttgggtaaggtcatcgatacccttacgtgcggcttcgccgacctcatggggtacataccgctcgtcggcgcccctctcggaggcgctgccaggccctggcgcatggcgtcagggttctggaagacggcgtgaactatgcaacagggaatcttcctggttgctctttctctatcttccttctggctctgctctcttgcctgaccgtgcccgcttcagcctacaagtgcgcaactcttcggggctttaccatgtcaccaatgattgccctaactcgagtattgtgtacgaggcggccgatgccattctgcacactccggggtgtgtcccttgtgtttacgagggtaacacctcgaggtgttggtggcggtgacccccacagtggccaccagggacggcaaactccccacgacgcagcttcgacgccacatcgatctgcttgtcgggagtgccaccctctgctcggccctctacgtgggggatctgtgcggtctgtctttcttgtcggccaactgttcaccttctctcccaggcgccaccggacgatgcagaactgcaattgttctatctaccccggccatataacgggccaccgcatggcatgggatatgatgatgaactggtcccctacgtggcattggcggtagctcagctgctccggatcccacaagccatcatggacatgatcgctggtgctcactggggagtcctggcgggcatagcgtatttctccatggtggggaactgggcgaaggtcctgtagtgctgctgctatttgccggcgtcgacgcggagacccacgtcaccgggggagctgccggccgctccacggctgggattgctggtctcttcagcccaggcgccagacagaacatccaactgatcaataccaacggcagtggcacatcaatagcacggccctgaactgcaacgacagcctcaacaccggctggatagcagggctcttctattccaacaaattcaactcttcgggctgtcccgagaggttggccagctgccgacgcctgccgattttgcccagggctggggccccatcagttacgccaacggaagcggccccgacgaacgcccctactgctggcactaccccccaagaccttgtggtattgtgcccgctaagagcgtgtgtggcccggtgtattgcttcctcccagccccgtggtggtgggaacgaccgacaggtcgggcgcgcctacctacaactggggtgaaaatgacacggacgtcttcgtcctcaacaacaccaggccgccgctgggcaattggttcggttgacctggatgaactcaagtggattcaccaaagtgtgcggagcgcccccttgtgtcatcggaggggtgggcaacaacaccttgcgctgccccactgattgcttccgcaaacatccggaagccacatactctcggtgcggctccgtccttggatcacacccaggtgcatggtcgactacccatataggctttggcattatccttgtaccatcaactacaccttattcaaagtcaggatgtacgtgggaggggtcgagcacaggctggaagcgcctgcaactggacgcggggcgaacgctgtgatctggaagacagggacaggtccgagctcagtccgttactgctgtccaccacgcagtggcaggtccttccgtgttcttttacgaccctgccagccttgtccaccggcctctccacctccaccagaacattgtggacgtgcagtacttgtacggggtagggtcaagcgtcgcgtcctgggccattaagtgggagtacgtcgttctcctgttccttctgcttgcagacgcgcgcgtctgtcctgcttgtggatgatgttactcatatcccaagcggaggcggctttggagaacctcgtagtactcaatgcagcatccctggccgggacgcacggtcttgtgtccttcctcgtgttcttctgctttgcgtggtatctgaaggtaggtgggcgcccggagcggtctacgccctctacgggatgtggcctctcctcctgctcctgctggcgctgcctcagcgggcatacgcactggacacggaggtggccgcgtcgtgtggcggcgttgtcttgtcgggttgatggcgctgactctgtcaccacattacaagcgcctcatctgctggtgcgtgtggtggcttcagtattttctaaccagagtggaagcgcacctgcacgtgtgggttccccccctcaacgtccgggggggggcgatgccatcatcttactcatgtgtgttatacacccggctctgatatttgacatcaccaaactgctgctggccgtcttcggacccctttggattcttcaagccagtttgctgaaagtcccctacttgtgcgcgttcaaggccttctccgaatctgcgcgctagcgcggaagttagccggaggtcattacgtgcagatggccatcatcaagttaggggcgcttactggcacctatgtctataaccatctcactcctctccgagactggcgcacaacggcctgcaagacctggccgtggctgtagaaccagtcatcttctcccgaatggagaccaaactcatcacgtggggggcagacaccgccgcgtgcggcgacatcatcaacggcttgcccgttccgcccgcaggggccgggagatattgcttggaccagccgacggaatggcctctaaagggtggaggttgctggcgcccatcacagcgtacgcccagcagacgagaggcctcctagggtgcataatcaccagcctgactggcgggataaaaaccaagtggagggtgaggtccagatcgtgtcaactgctacccaaaccttcctggcaacgtgcatcaatggggtatgctggactgtctaccacggggccggaacgaggaccatcgcatccccaggggtcctgttatccagatgtacaccaatgtggaccaggaccttgtgggctggcctgctcctcaaggttcccgctcattgacaccctgcacctgcggctcctcggacctttacctggtcacgaggcacgccgatgtcttcccgtgcgccggcgaggtgatagcaggggcagcttgctctcgccccggcccatttcctacttgaaaggctcctcggggggtccgctgttgtgccccgcgggacacgccgtgggcatatttagggcgcggtgtgcacccgtggtgtggctaaggcggtggacttcatccctgtggagaacctagagacaaccatgagatccccggtgttcacggacaactcttctccaccagcagtgccccagagcttccaggtggctcacctgcatctcccactggcagcggcaagagcaccaaggtcccggctgcgtacgcagctcagggctacaaagtgctagtgctcaacccctctgttgctgcaacattgggctttggtgcttacatgtccaaggctcaggggtcgatcctaatgtcaggacgggggtgcgaacaattaccaccggcagccccatcacgtactccacctacggcaagttccttgccgacggcgggtgctcaggaggtgcttatgacataataatttgtgatgagtgccacccacggatgccacatccatcttgggcatcggcactgtccttgaccaagcagagaccgcgggggcgagactggttgtgctcgccactgctacccctccgggctccgtcaccgtgccccatcctaacatgaggaggttgctctgtccaccaccggagagatccctttttacggcaaggctattcccctcgaggtcatcaaggggggaaggcatctcatcttctgccactcaaagaaaaagtgtgacgagctcgccgcaaagctggtcgcatgggcatcaatgccgtggcctactaccgcggtcttgacgtgtctgtcatcccgaccagcggcgatgttgtcgtcgtggcgaccgatgctctcatgactggctataccggcgacttcgactctgtgatgactgcaacacgtgtgtcacccagacagtcgacttcagccttgaccctaccttcaccattgagacaaccacgctcccccaagacgctgtctcccggactcaacgtcggggcagaaccggcagggggaagccaggcatctacgatttgtggcaccgggggaacgcccctccggcatgttcgactcgtccgtcatctgtgagtgctatgacgcgggctgtgcttggtatgagctcacgcccgccgagactacagttaggctacgagcgtaatgaacaccccggggctccccgtgtgccaggaccatcttgaattttgggagggcgtctttacgggcctcacccatatagatgcccactttctatcccagacaaagcagagtggagagaacttcccttacctggtagcgtacaagccaccgtgtgcgctagggctcaagcccctcccccatcgtgggaccagatgtggaagtgtttgatccgcctcaaacccaccctccatgggccaacacccctgctatacagactgggcgctgttcaaatgaagtcaccctgacgcacccagtcaccaaatacatcatgacatgcatgtcggctga

SEQ ID NO: 106 - DNA, 4869 bp, Hepatitis C virus
tcgcccacaggacgtcaagttcccgggtggcggtcagatcgttggtggagtttacttgttgccgcgcaggggccctagattgggtgtgcgcgcgacgaggaagacttccgagcggtcgcaacctcgagtagacgtcagcctatccccaaggcgcgtcggcccgagggcaggtcctgggctcagcccgggtacccttggcccctctatggcaatgagggttgcgggtgggcgggatggctcctgtctccccgtggtctcggcctagctggggccccacagacccccggcgtaggtcgcgcaatttgggtaaggtcatcgatacccttacgtgcggcttcgccgacctcatggggtacataccgctcgtcggcgcccctctcggaggcgctgccaggccctggcgcatggcgtcagggttctggaagacggcgtgaactatgcaacagggaatcttcctggttgctctttctctatcttccttctggctctgctctcttgcctgaccgtgcccgcttcagcctacaagtgcgcaactcttcggggctttaccatgtcaccaatgattgccctaactcgagtattgtgtacgaggcggccgatgccattctgcacactccggggtgtgtcccttgtgtttacgagggtaacacctcgaggtgttggtggcggtgacccccacagtggccaccagggacggcaaactccccacgacgcagcttcgacgccacatcgatctgcttgtcgggagtgccaccctctgctcggccctctacgtgggggatctgtgcggtctgtctttcttgtcggccaactgttcaccttctctcccaggcgccaccggacgatgcagaactgcaattgttctatctaccccggccatataacgggccaccgcatggcatgggatatgatgatgaactggtcccctacgtggcattggcggtagctcagctgctccggatcccacaagccatcatggacatgatcgctggtgctcactggggagtcctggcgggcatagcgtatttctccatggtggggaactgggcgaaggtcctgtagtgctgctgctatttgccggcgtcgacgcggagacccacgtcaccgggggagctgccggccgctccacggctgggattgctggtctcttcagcccaggcgccagacagaacatccaactgatcaataccaacggcagtggcacatcaatagcacggccctgaactgcaacgacagcctcaacaccggctggatagcagggctcttctattccaacaaattcaactcttcgggctgtcccgagaggttggccagctgccgacgcctgccgattttgcccagggctggggccccatcagttacgccaacggaagcggccccgacgaacgcccctactgctggcactaccccccaagaccttgtggtattgtgcccgctaagagcgtgtgtggcccggtgtattgcttcctcccagccccgtggtggtgggaacgaccgacaggtcgggcgcgcctacctacaactggggtgaaaatgacacggacgtcttcgtcctcaacaacaccaggccgccgctgggcaattggttcggttgacctggatgaactcaagtggattcaccaaagtgtgcggagcgcccccttgtgtcatcggaggggtgggcaacaacaccttgcgctgccccactgattgcttccgcaaacatccggaagccacatactctcggtgcggctccgtccttggatcacacccaggtgcatggtcgactacccatataggctttggcattatccttgtaccatcaactacaccttattcaaagtcaggatgtacgtgggaggggtcgagcacaggctggaagcgcctgcaactggacgcggggcgaacgctgtgatctggaagacagggacaggtccgagctcagtccgttactgctgtccaccacgcagtggcaggtccttccgtgttcttttacgaccctgccagccttgtccaccggcctctccacctccaccagaacattgtggacgtgcagtacttgtacggggtagggtcaagcatcgcgtcctgggccattaagtgggagtacgtcgttctcctgttccttctgcttgcagacgcgcgcgtctgtcctgcttgtggatgatgttactcatatcccaagcggaggcggctttggagaacctcgtagtactcaatgcagcatccctggccgggacgcacggtcttgtgtccttcctcgtgttcttctgctttgcgtggtatctgaaggtaggtgggcgcccggagcggtctacgccctctacgggatgtggcctctcctcctgctcctgctggcgctgcctcagcgggcatacgcactggacacggaggtggccgcgtcgtgtggcggcgttgtcttgtcgggttgatggcgctgactctgtcaccacattacaagcgcctcatctgctggtgcgtgtggtggcttcagtattttctaaccagagtggaagcgcacctgcacgtgtgggttccccccctcaacgtccgggggggggcgatgccatcatcttactcatgtgtgttatacacccggctctgatatttgacatcaccaaactgctgctggccgtcttcggacccctttggattcttcaagccagtttgctgaaagtcccctacttgtgcgcgttcaaggccttctccgaatctgcgcgctagcgcggaagttagccggaggtcattacgtgcagatggccatcatcaagttaggggcgcttactggcacctatgtctataaccatctcactcctctccgagactggcgcacaacggcctgcaagacctggccgtggctgtagaaccagtcatcttctcccgaatggagaccaaactcatcacgtggggggcagacaccgccgcgtgcggcgacatcatcaacggcttgcccgttccgcccgcaggggccgggagatattgcttggaccagccgacggaatggcctctaaagggtggaggttgctggcgcccatcacagcgtacgcccagcagacgagaggcctcctagggtgcataatcaccagcctgactggcgggataaaaaccaagtggagggtgaggtccagatcgtgtcaactgctacccaaaccttcctggcaacgtgcatcaatggggtatgctggactgtctaccacggggccggaacgaggaccatcgcatccccaggggtcctgttatccagatgtacaccaatgtggaccaggaccttgtgggctggcctgctcctcaaggttcccgctcattgacaccctgcacctgcggctcctcggacctttacctggtcacgaggcacgccgatgtcttcccgtgcgccggcgaggtgatagcaggggcagcttgctctcgccccggcccatttcctacttgaaaggctcctcggggggtccgctgttgtgccccgcgggacacgccgtgggcatatttagggcgcggtgtgcacccgtggtgtggctaaggcggtggacttcatccctgtggagaacctagagacaaccatgagatccccggtgttcacggacaactcttctccaccagcagtgccccagagcttccaggtggctcacctgcatctcccactggcagcggcaagagcaccaaggtcccggctgcgtacgcagctcagggctacaaagtgctagtgctcaacccctctgttgctgcaacattgggctttggtgcttacatgtccaaggctcaggggtcgatcctaatgtcaggacgggggtgcgaacaattaccaccggcagccccatcacgtactccacctacggcaagttccttgccgacggcgggtgctcaggaggtgcttatgacataataatttgtgatgagtgccacccacggatgccacatccatcttgggcatcggcactgtccttgaccaagcagagaccgcgggggcgagactggttgtgctcgccactgctacccctccgggctccgtcaccgtgccccatcctaacatgaggaggttgctctgtccaccaccggagagatccctttttacggcaaggctattcccctcgaggtcatcaaggggggaaggcatctcatcttctgccactcaaagaaaaagtgtgacgagctcgccgcaaagctggtcgcatgggcatcaatgccgtggcctactaccgcggtcttgacgtgtctgtcatcccgaccagcggcgatgttgtcgtcgtggcgaccgatgctctcatgactggctataccggcgacttcgactctgtgatgactgcaacacgtgtgtcacccagacagtcgatttcagccttgaccctaccttcaccattgagacaaccacgctcccccaagacgctgtctcccggactcaacgtcggggcagaaccggcagggggaagccaggcatctacgatttgtggcaccgggggaacgcccctccggcatgttcgactcgtccgtcatctgtgagtgctatgacgcgggctgtgcttggtatgagctcacgcccgccgagactacagttaggctacgagcgtaatgaacaccccggggctccccgtgtgccaggaccatcttgaattttgggagggcgtctttacgggcctcacccatatagatgcccactttctatcccagacaaagcagagtggagagaacttcccttacctggtagcgtacaagccaccgtgtgcgctagggctcaagcccctcccccatcgtgggaccagatgtggaagtgtttgatccgcctcaaacccaccctccatgggccaacacccctgctacacagactgggcgctgttcaaatgaagtcaccctgacgcacccagtcaccaaatacatcatgacatgcatgtcggctga

SEQ ID NO: 107 - DNA, 4869 bp, Hepatitis C virus
tcgcccacaggacgtcaagttcccgggtggcggtcagatcgttggtggagtttacttgttgccgcgcaggggccctagattgggtgtgcgcgcgacgaggaagacttccgagcggtcgcaacctcgagtagacgtcagcctatccccaaggcgcgtcggcccgagggcaggtcctgggctcagcccgggtacccttggcccctctatggcaatgagggttgcgggtgggcgggatggctcctgtctccccgtggtctcggcctagctggggccccacagacccccggcgtaggtcgcgcaatttgggtaaggtcatcgatacccttacgtgcggcttcgccgacctcatggggtacataccgctcgtcggcgcccctctcggaggcgctgccaggccctggcgcatggcgtcagggttctggaagacggcgtgaactatgcaacagggaatcttcctggttgctctttctctatcttccttctggctctgctctcttgcctgaccgtgcccgcttcagcctacaagtgcgcaactcttcggggctttaccatgtcaccaatgattgccctaactcgagtattgtgtacgaggcggccgatgccattctgcacactccggggtgtgtcccttgtgtttacgagggtaacacctcgaggtgttggtggcggtgacccccacagtggccaccagggacggcaaactccccacgacgcagcttcgacgccacatcgatctgcttgtcgggagtgccaccctctgctcggccctctacgtgggggatctgtgcggtctgtctttcttgtcggccaactgttcaccttctctcccaggcgccaccggacgatgcagaactgcaattgttctatctaccccggccatataacgggccaccgcatggcatgggatatgatgatgaactggtcccctacgtggcattggcggtagctcagctgctccggatcccacaagccatcatggacatgatcgctggtgctcactggggagtcctggcgggcatagcgtatttctccatggtggggaactgggcgaaggtcctgtagtgctgctgctatttgccggcgtcgacgcggagacccacgtcaccgggggagctgccggccgctccacggctgggattgctggtctcttcagcccaggcgccagacagaacatccaactgatcaataccaacggcagtggcacatcaatagcacggccctgaactgcaacgacagcctcaacaccggctggatagcagggctcttctattccaacaaattcaactcttcgggctgtcccgagaggttggccagctgccgacgcctgccgattttgcccagggctggggccccatcagttacgccaacggaagcggccccgacgaacgcccctactgctggcactaccccccaagaccttgtggtattgtgcccgctaagagcgtgtgtggcccggtgtattgcttcctcccagccccgtggtggtgggaacgaccgacaggtcgggcgcgcctacctacaactggggtgaaaatgacacggacgtcttcgtcctcaacaacaccaggccgccgctgggcaattggttcggttgacctggatgaactcaagtggattcaccaaagtgtgcggagcgcccccttgtgtcatcggaggggtgggcaacaacaccttgcgctgccccactgattgcttccgcaaacatccggaagccacatactctcggtgcggctccgtccttggatcacacccaggtgcatggtcgactacccatataggctttggcattatccttgtaccatcaactacaccttattcaaagtcaggatgtacgtgggaggggtcgagcacaggctggaagcgcctgcaactggacgcggggcgaacgctgtgatctggaagacagggacaggtccgagctcagtccgttactgctgtccaccacgcagtggcaggtccttccgtgttcttttacgaccctgccagccttgtccaccggcctctccacctccaccagaacattgtggacgtgcagtacttgtacggggtagggtcaagcatcgcgtcctgggccattaagtgggagtacgtcgttctcctgttccttctgcttgcagacgcgcgcgtctgtcctgcttgtggatgatgttactcatatcccaagcggaggcggctttggagaacctcgtagtactcaatgcagcatccctggccgggacgcacggtcttgtgtccttcctcgtgttcttctgctttgcgtggtatctgaaggtaggtgggcgcccggagcggtctacgccctctacgggatgtggcctctcctcctgctcctgctggcgctgcctcagcgggcatacgcactggacacggaggtggccgcgtcgtgtggcggcgttgtcttgtcgggttgatggcgctgactctgtcaccacattacaagcgcctcatctgctggtgcgtgtggtggcttcagtattttctaaccagagtggaagcgcacctgcacgtgtgggttccccccctcaacgtccgggggggggcgatgccatcatcttactcatgtgtgttatacacccggctctgatatttgacatcaccaaactgctgctggccgtcttcggacccctttggattcttcaagccagtttgctgaaagtcccctacttgtgcgcgttcaaggccttctccgaatctgcgcgctagcgcggaagttagccggaggtcattacgtgcagatggccatcatcaagttaggggcgcttactggcacctatgtctataaccatctcactcctctccgagactggcgcacaacggcctgcaagacctggccgtggctgtagaaccagtcatcttctcccgaatggagaccaaactcatcacgtggggggcagacaccgccgcgtgcggcgacatcatcaacggcttgcccgttccgcccgcaggggccgggagatattgcttggaccagccgacggaatggcctctaaagggtggaggttgctggcgcccatcacagcgtacgcccagcagacgagaggcctcctagggtgcataatcaccagcctgactggcgggataaaaaccaagtggagggtgaggtccagatcgtgtcaactgctacccaaaccttcctggcaacgtgcatcaatggggtatgctggactgtctaccacggggccggaacgaggaccatcgcatccccaggggtcctgttatccagatgtacaccaatgtggaccaggaccttgtgggctggcctgctcctcaaggttcccgctcattgacaccctgcacctgcggctcctcggacctttacctggtcacgaggcacgccgatgtcttcccgtgcgccggcgaggtgatagcaggggcagcttgctctcgccccggcccatttcctacttgaaaggctcctcggggggtccgctgttgtgccccgcgggacacgccgtgggcatatttagggcgcggtgtgcacccgtggtgtggctaaggcggtggacttcatccctgtggagaacctagagacaaccatgagatccccggtgttcacggacaactcttctccaccagcagtgccccagagcttccaggtggctcacctgcatctcccactggcagcggcaagagcaccaaggtcccggctgcgtacgcagctcagggctacaaagtgctagtgctcaacccctctgttgctgcaacattgggctttggtgcttacatgtccaaggctcaggggtcgatcctaatgtcaggacgggggtgcgaacaattaccaccggcagccccatcacgtactccacctacggcaagttccttgccgacggcgggtgctcaggaggtgcttatgacataataatttgtgatgagtgccacccacggatgccacatccatcttgggcatcggcactgtccttgaccaagcagagaccgcgggggcgagactggttgtgctcgccactgctacccctccgggctccgtcaccgtgccccatcctaacatgaggaggttgctctgtccaccaccggagagatccctttttacggcaaggctattcccctcgaggtcatcaaggggggaaggcatctcatcttctgccactcaaagaaaaagtgtgacgagctcgccgcaaagctggtcgcatgggcatcaatgccgtggcctactaccgcggtcttgacgtgtctgtcatcccgaccagcggcgatgttgtcgtcgtggcgaccgatgctctcatgactggctataccggcgacttcgactctgtgatgactgcaacacgtgtgtcacccagacagtcgatttcagccttgaccctaccttcaccattgagacaaccacgctcccccaagacgctgtctcccggactcaacgtcggggcagaaccggcagggggaagccgggcatctacgatttgtggcaccgggggaacgcccctccggcatgttcgactcgtccgtcatctgtgagtgctatgacgcgggctgtgcttggtatgagctcacgcccgccgagactacagttaggctacgagcgtaatgaacaccccggggctccccgtgtgccaggaccatcttgaattttgggagggcgtctttacgggcctcacccatatagatgcccactttctatcccagacaaagcagagtggagagaacttcccttacctggtagcgtacaagccaccgtgtgcgctagggctcaagcccctcccccatcgtgggaccagatgtggaagtgtttgatccgcctcaaacccaccctccatgggccaacacccctgctatacagactgggcgctgttcaaatgaagtcaccctgacgcacccagtcaccaaatacatcatgacatgcatgtcggctga

SEQ ID NO: 108 - DNA, 4869 bp, Hepatitis C virus
tcgcccacaggacgtcaagttcccgggtggcggtcagatcgttggtggagtttacttgttgccgcgcaggggccctagattgggtgtgcgcgcgacgaggaagacttccgagcggtcgcaacctcgagtagacgtcagcctatccccaaggcgcgtcggcccgagggcaggtcctgggctcagcccgggtacccttggcccctctatggcaatgagggttgcgggtgggcgggatggctcctgtctccccgtggtctcggcctagctggggccccacagacccccggcgtaggtcgcgcaatttgggtaaggtcatcgatacccttacgtgcggcttcgccgacctcatggggtacataccgctcgtcggcgcccctctcggaggcgctgccaggccctggcgcatggcgtcagggttctggaagacggcgtgaactatgcaacagggaatcttcctggttgctctttctctatcttccttctggctctgctctcttgcctgaccgtgcccgcttcagcctacaagtgcgcaactcttcggggctttaccatgtcaccaatgattgccctaactcgagtattgtgtacgaggcggccgatgccattctgcacactccggggtgtgtcccttgtgtttacgagggtaacacctcgaggtgttggtggcggtgacccccacagtggccaccagggacggcaaactccccacgacgcagcttcgacgccacatcgatctgcttgtcgggagtgccaccctctgctcggccctctacgtgggggatctgtgcggtctgtctttcttgtcggccaactgttcaccttctctcccaggcgccaccggacgatgcagaactgcaattgttctatctaccccggccatataacgggccaccgcatggcatgggatatgatgatgaactggtcccctacgtggcattggcggtagctcagctgctccggatcccacaagccatcatggacatgatcgctggtgctcactggggagtcctggcgggcatagcgtatttctccatggtggggaactgggcgaaggtcctgtagtgctgctgctatttgccggcgtcgacgcggagacccacgtcaccgggggagctgccggccgctccacggctgggattgctggtctcttcagcccaggcgccagacagaacatccaactgatcaataccaacggcagtggcacatcaatagcacggccctgaactgcaacgacagcctcaacaccggctggatagcagggctcttctattccaacaaattcaactcttcgggctgtcccgagaggttggccagctgccgacgcctgccgattttgcccagggctggggccccatcagttacgccaacggaagcggccccgacgaacgcccctactgctggcactaccccccaagaccttgtggtattgtgcccgctaagagcgtgtgtggcccggtgtattgcttcctcccagccccgtggtggtgggaacgaccgacaggtcgggcgcgcctacctacaactggggtgaaaatgacacggacgtcttcgtcctcaacaacaccaggccgccgctgggcaattggttcggttgacctggatgaactcaagtggattcaccaaagtgtgcggagcgcccccttgtgtcatcggaggggtgggcaacaacaccttgcgctgccccactgattgcttccgcaaacatccggaagccacatactctcggtgcggctccgtccttggatcacacccaggtgcatggtcgactacccatataggctttggcattatccttgtaccatcaactacaccttattcaaagtcaggatgtacgtgggaggggtcgagcacaggctggaagcgcctgcaactggacgcggggcgaacgctgtgatctggaagacagggacaggtccgagctcagtccgttactgctgtccaccacgcagtggcaggtccttccgtgttcttttacgaccctgccagccttgtccaccggcctctccacctccaccagaacattgtggacgtgcagtacttgtacggggtagggtcaagcatcgcgtcctgggccattaagtgggagtacgtcgttctcctgttccttctgcttgcagacgcgcgcgtctgtcctgcttgtggatgatgttactcatatcccaagcggaggcggctttggagaacctcgtagtactcaatgcagcatccctggccgggacgcacggtcttgtgtccttcctcgtgttcttctgctttgcgtggtatctgaaggtaggtgggcgcccggagcggtctacgccctctacgggatgtggcctctcctcctgctcctgctggcgctgcctcagcgggcatacgcactggacacggaggtggccgcgtcgtgtggcggcgttgtcttgtcgggttgatggcgctgactctgtcaccacattacaagcgcctcatctgctggtgcgtgtggtggcttcagtattttctaaccagagtggaagcgcacctgcacgtgtgggttccccccctcaacgtccgggggggggcgatgccatcatcttactcatgtgtgttatacacccggctctgatatttgacatcaccaaactgctgctggccgtcttcggacccctttggattcttcaagccagtttgctgaaagtcccctacttgtgcgcgttcaaggccttctccgaatctgcgcgctagcgcggaagttagccggaggtcattacgtgcagatggccatcatcaagttaggggcgcttactggcacctatgtctataaccatctcactcctctccgagactggcgcacaacggcctgcaagacctggccgtggctgtagaaccagtcatcttctcccgaatggagaccaaactcatcacgtggggggcagacaccgccgcgtgcggcgacatcatcaacggcttgcccgttccgcccgcaggggccgggagatattgcttggaccagccgacggaatggcctctaaagggtggaggttgctggcgcccatcacagcgtacgcccagcagacgagaggcctcctagggtgcataatcaccagcctgactggcgggataaaaaccaagtggagggtgaggtccagatcgtgtcaactgctacccaaaccttcctggcaacgtgcatcaatggggtatgctggactgtctaccacggggccggaacgaggaccatcgcatccccaggggtcctgttatccagatgtacaccaatgtggaccaggaccttgtgggctggcctgctcctcaaggttcccgctcattgacaccctgcacctgcggctcctcggacctttacctggtcacgaggcacgccgatgtcttcccgtgcgccggcgaggtgatagcaggggcagcttgctctcgccccggcccatttcctacttgaaaggctcctcggggggtccgctgttgtgccccgcgggacacgccgtgggcatatttagggcgcggtgtgcacccgtggtgtggctaaggcggtggacttcatccctgtggagaacctagagacaaccatgagatccccggtgttcacggacaactcttctccaccagcagtgccccagagcttccaggtggctcacctgcatctcccactggcagcggcaagagcaccaaggtcccggctgcgtacgcagctcagggctacaaagtgctagtgctcaacccctctgttgctgcaacattgggctttggtgcttacatgtccaaggctcaggggtcgatcctaatgtcaggacgggggtgcgaacaattaccaccggcagccccatcacgtactccacctacggcaagttccttgccgacggcgggtgctcaggaggtgcttatgacataataatttgtgatgagtgccacccacggatgccacatccatcttgggcatcggcactgtccttgaccaagcagagaccgcgggggcgagactggttgtgctcgccactgctacccctccgggctccgtcaccgtgccccatcctaacatgaggaggttgctctgtccaccaccggagagatccctttttacggcaaggctattcccctcgaggtcatcaaggggggaaggcatctcatcttctgccactcaaagaaaaagtgtgacgagctcgccgcaaagctggtcgcatgggcatcaatgccgtggcctactaccgcggtcttgacgtgtctgtcatcccgaccagcggcgatgttgtcgtcgtggcgaccgatgctctcatgactggctataccggcgacttcgactctgtgatgactgcaacacgtgtgtcacccagacagtcgatttcagccttgaccctaccttcaccattgagacaaccacgctcccccaagacgctgtctcccggactcaacgtcggggcagaaccggcagggggaagccaggcatctacgatttgtggcaccgggggaacgcccctccggcatgttcgactcgtccgtcatctgtgagtgctatgacgcgggctgtgcttggtatgagctcacgcccgccgagactacagttaggctacgagcgtaatgaacaccccggggctccccgtgtgccaggaccatcttgaattttgggagggcgtctttacgggcctcacccatatagatgcccactttctatcccagacaaagcagagtggagagaacttcccttacctggtagcgtacaagccaccgtgtgcgctagggctcaagcccctcccccatcgtgggaccagatgtggaagtgtttgatccgcctcaaacccaccctccatgggccaacacccctgctatacaggctgggcgctgttcaaatgaagtcaccctgacgcacccagtcaccaaatacatcatgacatgcatgtcggctga

SEQ ID NO: 109 - DNA, 4869 bp, Hepatitis C virus
tcgcccacaggacgtcaagttcccgggtggcggtcagatcgttggtggagtttacttgttgccgcgcaggggccctagattgggtgtgcgcgcgacgaggaagacttccgagcggtcgcaacctcgagtagacgtcagcctatccccaaggcgcgtcggcccgagggcaggtcctgggctcagcccgggtacccttggcccctctatggcaatgagggttgcgggtgggcgggatggctcctgtctccccgtggtctcggcctagctggggccccacagacccccggcgtaggtcgcgcaatttgggtaaggtcatcgatacccttacgtgcggcttcgccgacctcatggggtacataccgctcgtcggcgcccctctcggaggcgctgccaggccctggcgcatggcgtcagggttctggaagacggcgtgaactatgcaacagggaatcttcctggttgctctttctctatcttccttctggctctgctctcttgcctgaccgtgcccgcttcagcctacaagtgcgcaactcttcggggctttaccatgtcaccaatgattgccctaactcgagtattgtgtacgaggcggccgatgccattctgcacactccggggtgtgtcccttgtgtttacgagggtaacacctcgaggtgttggtggcggtgacccccacagtggccaccagggacggcaaactccccacgacgcagcttcgacgccacatcgatctgcttgtcgggagtgccaccctctgctcggccctctacgtgggggatctgtgcggtctgtctttcttgtcggccaactgttcaccttctctcccaggcgccaccggacgatgcagaactgcaattgttctatctaccccggccatataacgggccaccgcatggcatgggatatgatgatgaactggtcccctacgtggcattggcggtagctcagctgctccggatcccacaagccatcatggacatgatcgctggtgctcactggggagtcctggcgggcatagcgtatttctccatggtggggaactgggcgaaggtcctgtagtgctgctgctatttgccggcgtcgacgcggagacccacgtcaccgggggagctgccggccgctccacggctgggattgctggtctcttcagcccaggcgccagacagaacatccaactgatcaataccaacggcagtggcacatcaatagcacggccctgaactgcaacgacagcctcaacaccggctggatagcagggctcttctattccaacaaattcaactcttcgggctgtcccgagaggttggccagctgccgacgcctgccgattttgcccagggctggggccccatcagttacgccaacggaagcggccccgacgaacgcccctactgctggcactaccccccaagaccttgtggtattgtgcccgctaagagcgtgtgtggcccggtgtattgcttcctcccagccccgtggtggtgggaacgaccgacaggtcgggcgcgcctacctacaactggggtgaaaatgacacggacgtcttcgtcctcaacaacaccaggccgccgctgggcaattggttcggttgacctggatgaactcaagtggattcaccaaagtgtgcggagcgcccccttgtgtcatcggaggggtgggcaacaacaccttgcgctgccccactgattgcttccgcaaacatccggaagccacatactctcggtgcggctccgtccttggatcacacccaggtgcatggtcgactacccatataggctttggcattatccttgtaccatcaactacaccttattcaaagtcaggatgtacgtgggaggggtcgagcacaggctggaagcgcctgcaactggacgcggggcgaacgctgtgatctggaagacagggacaggtccgagctcagtccgttactgctgtccaccacgcagtggcaggtccttccgtgttcttttacgaccctgccagccttgtccaccggcctctccacctccaccagaacattgtggacgtgcagtacttgtacggggtagggtcaagcatcgcgtcctgggccattaagtgggagtacgtcgttctcctgttccttctgcttgcagacgcgcgcgtctgtcctgcttgtggatgatgttactcatatcccaagcggaggcggctttggagaacctcgtagtactcaatgcagcatccctggccgggacgcacggtcttgtgtccttcctcgtgttcttctgctttgcgtggtatctgaaggtaggtgggcgcccggagcggtctacgccctctacgggatgtggcctctcctcctgctcctgctggcgctgcctcagcgggcatacgcactggacacggaggtggccgcgtcgtgtggcggcgttgtcttgtcgggttgatggcgctgactctgtcaccacattacaagcgcctcatctgctggtgcgtgtggtggcttcagtattttctaaccagagtggaagcgcacctgcacgtgtgggttccccccctcaacgtccgggggggggcgatgccatcatcttactcatgtgtgttatacacccggctctgatatttgacatcaccaaactgctgctggccgtcttcggacccctttggattcttcaagccagtttgctgaaagtcccctacttgtgcgcgttcaaggccttctccgaatctgcgcgctagcgcggaagttagccggaggtcattacgtgcagatggccatcatcaagttaggggcgcttactggcacctatgtctataaccatctcactcctctccgagactggcgcacaacggcctgcaagacctggccgtggctgtagaaccagtcatcttctcccgaatggagaccaaactcatcacgtggggggcagacaccgccgcgtgcggcgacatcatcaacggcttgcccgttccgcccgcaggggccgggagatattgcttggaccagccgacggaatggcctctaaagggtggaggttgctggcgcccatcacagcgtacgcccagcagacgagaggcctcctagggtgcataatcaccagcctgactggcgggataaaaaccaagtggagggtgaggtccagattgtgtcaactgctacccaaaccttcctggcaacgtgcatcaatggggtatgctggactgtctaccacggggccggaacgaggaccatcgcatccccaggggtcctgttatccagatgtacaccaatgtggaccaggaccttgtgggctggcctgctcctcaaggttcccgctcattgacaccctgcacctgcggctcctcggacctttacctggtcacgaggcacgccgatgtcttcccgtgcgccggcgaggtgatagcaggggcagcttgctctcgccccggcccatttcctacttgaaaggctcctcggggggtccgctgttgtgccccgcgggacacgccgtgggcatatttagggcgcggtgtgcacccgtggtgtggctaaggcggtggacttcatccctgtggagaacctagagacaaccatgagatccccggtgttcacggacaactcttctccaccagcagtgccccagagcttccaggtggctcacctgcatctcccactggcagcggcaagagcaccaaggtcccggctgcgtacgcagctcagggctacaaagtgctagtgctcaacccctctgttgctgcaacattgggctttggtgcttacatgtccaaggctcaggggtcgatcctaatgtcaggacgggggtgcgaacaattaccaccggcagccccatcacgtactccacctacggcaagttccttgccgacggcgggtgctcaggaggtgcttatgacataataatttgtgatgagtgccacccacggatgccacatccatcttgggcatcggcactgtccttgaccaagcagagaccgcgggggcgagactggttgtgctcgccactgctacccctccgggctccgtcaccgtgccccatcctaacatgaggaggttgctctgtccaccaccggagagatccctttttacggcaaggctattcccctcgaggtcatcaaggggggaaggcatctcatcttctgccactcaaagaaaaagtgtgacgagctcgccgcaaagctggtcgcatgggcatcaatgccgtggcctactaccgcggtcttgacgtgtctgtcatcccgaccagcggcgatgttgtcgtcgtggcgaccgatgctctcatgactggctataccggcgacttcgactctgtgatgactgcaacacgtgtgtcacccagacagtcgatttcagccttgaccctaccttcaccattgagacaaccacgctcccccaagacgctgtctcccggactcaacgtcggggcagaaccggcagggggaagccaggcatctacgatttgtggcaccgggggaacgcccctccggcatgttcgactcgtccgtcatctgtgagtgctatgacgcgggctgtgcttggtatgagctcacgcccgccgagactacagttaggctacgagcgtaatgaacaccccggggctccccgtgtgccaggaccatcttgaattttgggagggcgtctttacgggcctcacccatatagatgcccactttctatcccagacaaagcagagtggagagaacttcccttacctggtagcgtacaagccaccgtgtgcgctagggctcaagcccctcccccatcgtgggaccagatgtggaagtgtttgatccgcctcaaacccaccctccatgggccaacacccctgctatacagactgggcgctgttcaaatgaagtcaccctgacgcacccagtcaccaaatacatcatgacatgcatgtcggctga

SEQ ID NO: 110 - DNA, 4869 bp, Hepatitis C virus
tcgcccacaggacgtcaagttcccgggtggcggtcagatcgttggtggagtttacttgttgccgcgcaggggccctagattgggtgtgcgcgcgacgaggaagacttccgagcggtcgcaacctcgagtagacgtcagcctatccccaaggcgcgtcggcccgagggcaggtcctgggctcagcccgggtacccttggcccctctatggcaatgagggttgcgggtgggcgggatggctcctgtctccccgtggtctcggcctagctggggccccacagacccccggcgtaggtcgcgcaatttgggtaaggtcatcgatacccttacgtgcggcttcgccgacctcatggggtacataccgctcgtcggcgcccctctcggaggcgctgccaggccctggcgcatggcgtcagggttctggaagacggcgtgaactatgcaacagggaatcttcctggttgctctttctctatcttccttctggctctgctctcttgcctgaccgtgcccgcttcagcctacaagtgcgcaactcttcggggctttaccatgtcaccaatgattgccctaactcgagtattgtgtacgaggcggccgatgccattctgcacactccggggtgtgtcccttgtgtttacgagggtaacacctcgaggtgttggtggcggtgacccccacagtggccaccagggacggcaaactccccacgacgcagcttcgacgccacatcgatctgcttgtcgggagtgccaccctctgctcggccctctacgtgggggatctgtgcggtctgtctttcttgtcggccaactgttcaccttctctcccaggcgccaccggacgatgcagaactgcaattgttctatctaccccggccatataacgggccaccgcatggcatgggatatgatgatgaactggtcccctacgtggcattggcggtagctcagctgctccggatcccacaagccatcatggacatgatcgctggtgctcactggggagtcctggcgggcatagcgtatttctccatggtggggaactgggcgaaggtcctgtagtgctgctgctatttgccggcgtcgacgcggagacccacgtcaccgggggagctgccggccgctccacggctgggattgctggtctcttcagcccaggcgccagacagaacatccaactgatcaataccaacggcagtggcacatcaatagcacggccctgaactgcaacgacagcctcaacaccggctggatagcagggctcttctattccaacaaattcaactcttcgggctgtcccgagaggttggccagctgccgacgcctgccgattttgcccagggctggggccccatcagttacgccaacggaagcggccccgacgaacgcccctactgctggcactaccccccaagaccttgtggtattgtgcccgctaagagcgtgtgtggcccggtgtattgcttcctcccagccccgtggtggtgggaacgaccgacaggtcgggcgcgcctacctacaactggggtgaaaatgacacggacgtcttcgtcctcaacaacaccaggccgccgctgggcaattggttcggttgacctggatgaactcaagtggattcaccaaagtgtgcggagcgcccccttgtgtcatcggaggggtgggcaacaacaccttgcgctgccccactgattgcttccgcaaacatccggaagccacatactctcggtgcggctccgtccttggatcacacccaggtgcatggtcgactacccatataggctttggcattatccttgtaccatcaactacaccttattcaaagtcaggatgtacgtgggaggggtcgagcacaggctggaagcgcctgcaactggacgcggggcgaacgctgtgatctggaagacagggacaggtccgagctcagtccgttactgctgtccaccacgcagtggcaggtccttccgtgttcttttacgaccctgccagccttgtccaccggcctctccacctccaccagaacattgtggacgtgcagtacttgtacggggtagggtcaagcatcgcgtcctgggccattaagtgggagtacgtcgttctcctgttccttctgcttgcagacgcgcgcgtctgtcctgcttgtggatgatgttactcatatcccaagcggaggcggctttggagaacctcgtagtactcaatgcagcatccctggccgggacgcacggtcttgtgtccttcctcgtgttcttctgctttgcgtggtatctgaaggtaggtgggcgcccggagcggtctacgccctctacgggatgtggcctctcctcctgctcctgctggcgctgcctcagcgggcatacgcactggacacggaggtggccgcgtcgtgtggcggcgttgtcttgtcgggttgatggcgctgactctgtcaccacattacaagcgcctcatctgctggtgcgtgtggtggcttcagtattttctaaccagagtggaagcgcacctgcacgtgtgggttccccccctcaacgtccgggggggggcgatgccatcatcttactcatgtgtgttatacacccggctctgatatttgacatcaccaaactgctgctggccgtcttcggacccctttggattcttcaagccagtttgctgaaagtcccctacttgtgcgcgttcaaggccttctccgaatctgcgcgctagcgcggaagttagccggaggtcattacgtgcagatggccatcatcaagttaggggcgcttactggcacctatgtctataaccatctcactcctctccgagactggcgcacaacggcctgcaagacctggccgtggctgtagaaccagtcatcttctcccgaatggagaccaaactcatcacgtggggggcagacaccgccgcgtgcggcgacatcatcaacggcttgcccgttccgcccgcaggggccgggagatattgcttggaccagccgacggaatggcctctaaagggtggaggttgctggcgcccatcacagcgtacgcccagcagacgagaggcctcctagggtgcataatcaccagcctgactggcgggataaaaaccaagtggagggtgaggtccagatcgtgtcaactgctacccaaaccttcctggcaacgtgcatcaatggggtatgctggactgtctaccacggggccggaacgaggaccatcgcatccccaggggtcctgttatccagatgtacaccaatgtggaccaggaccttgtgggctggcctgctcctcaaggttcccgctcattgacaccctgcacctgcggctcctcggacctttacctggtcacgaggcacgccgatgtcttcccgtgcgccggcgaggtgatagcaggggcagcttgctctcgccccggcccatttcctacttgaaaggctcctcggggggtccgctgttgtgccccgcgggacacgccgtgggcatatttagggcgcggtgtgcacccgtggtgtggctaaggcggtggacttcatccctgtggagaacctagagacaaccatgagatccccggtgttcacggacaactcttctccaccagcagtgccccagagcttccaggtggctcacctgcatctcccactggcagcggcaagagcaccaaggtcccggctgcgtacgcagctcagggctacaaagtgctagtgctcaacccctctgttgctgcaacattgggctttggtgcttacatgtccaaggctcaggggtcgatcctaatgtcaggacgggggtgcgaacaattaccaccggcagccccatcacgtactccacctacggcaagttccttgccgacggcgggtgctcaggaggtgcttatgacataataatttgtgatgagtgccacccacggatgccacatccatcttgggcatcggcactgtccttgaccaagcagagaccgcgggggcgagactggttgtgctcgccactgctacccctccgggctccgtcaccgtgccccatcctaacatgaggaggttgctctgtccaccaccggagagatccctttttacggcaaggctattcccctcgaggtcatcaaggggggaaggcatctcatcttctgccactcaaagaaaaagtgtgacgagctcgccgcaaagctggtcgcatgggcatcaatgccgtggcctactaccgcggtcttgacgtgtctgtcatcccgaccagcggcgatgttgtcgtcgtggcgaccgatgctctcatgactggctataccggcgacttcgactctgtgatgactgcaacacgtgtgtcacccagacagtcgatttcagccttgaccctaccttcaccattgagacaaccacgctcccccaagacgctgtctcccggactcaacgtcggggcagaaccggcagggggaagccaggcatctacgatttgtggcaccgggggaacgcccctccggcatgttcgactcgtccgtcatctgtgagtgctatgacgcgggctgtgcttggtatgagctcacgcccgccgagactacagttaggctacgagcgtaatgaacaccccggggctccccgtgtgccaggaccatcttgaattttgggagggcgtctttacgggcctcacccatatagatgcccactttctatcccagacaaagcagagtggagagaacttcccttacctggtagcgtacaagccaccgtgcgcgctagggctcaagcccctcccccatcgtgggaccagatgtggaagtgtttgatccgcctcaaacccaccctccatgggccaacacccctgctatacagactgggcgctgttcaaatgaagtcaccctgacgcacccagtcaccaaatacatcatgacatgcatgtcggctga

SEQ ID NO: 111 - DNA, 4869 bp, Hepatitis C virus
tcgcccacaggacgtcaagttcccgggtggcggtcagatcgttggtggagtttacttgttgccgcgcaggggccctagattgggtgtgcgcgcgacgaggaagacttccgagcggtcgcaacctcgagtagacgtcagcctatccccaaggcgcgtcggcccgagggcaggtcctgggctcagcccgggtacccttggcccctctatggcaatgagggttgcgggtgggcgggatggctcctgtctccccgtggtctcggcctagctggggccccacagacccccggcgtaggtcgcgcaatttgggtaaggtcatcgatacccttacgtgcggcttcgccgacctcatggggtacataccgctcgtcggcgcccctctcggaggcgctgccaggccctggcgcatggcgtcagggttctggaagacggcgtgaactatgcaacagggaatcttcctggttgctctttctctatcttccttctggctctgctctcttgcctgaccgtgcccgcttcagcctacaagtgcgcaactcttcggggctttaccatgtcaccaatgattgccctaactcgagtattgtgtacgaggcggccgatgccattctgcacactccggggtgtgtcccttgtgtttacgagggtaacacctcgaggtgttggtggcggtgacccccacagtggccaccagggacggcaaactccccacgacgcagcttcgacgccacatcgatctgcttgtcgggagtgccaccctctgctcggccctctacgtgggggatctgtgcggtctgtctttcttgtcggccaactgttcaccttctctcccaggcgccaccggacgatgcagaactgcaattgttctatctaccccggccatataacgggccaccgcatggcatgggatatgatgatgaactggtcccctacgtggcattggcggtagctcagctgctccggatcccacaagccatcatggacatgatcgctggtgctcactggggagtcctggcgggcatagcgtatttctccatggtggggaactgggcgaaggtcctgtagtgctgctgctatttgccggcgtcgacgcggagacccacgtcaccgggggagctgccggccgctccacggctgggattgctggtctcttcagcccaggcgccagacagaacatccaactgatcaataccaacggcagtggcacatcaatagcacggccctgaactgcaacgacagcctcaacaccggctggatagcagggctcttctattccaacaaattcaactcttcgggctgtcccgagaggttggccagctgccgacgcctgccgattttgcccagggctggggccccatcagttacgccaacggaagcggccccgacgaacgcccctactgctggcactaccccccaagaccttgtggtattgtgcccgctaagagcgtgtgtggcccggtgtattgcttcctcccagccccgtggtggtgggaacgaccgacaggtcgggcgcgcctacctacaactggggtgaaaatgacacggacgtcttcgtcctcaacaacaccaggccgccgctgggcaattggttcggttgacctggatgaactcaagtggattcaccaaagtgtgcggagcgcccccttgtgtcatcggaggggtgggcaacaacaccttgcgctgccccactgattgcttccgcaaacatccggaagccacatactctcggtgcggctccgtccttggatcacacccaggtgcatggtcgactacccatataggctttggcattatccttgtaccatcaactacaccttattcaaagtcaggatgtacgtgggaggggtcgagcacaggctggaagcgcctgcaactggacgcggggcgaacgctgtgatttggaagacagggacaggtccgagctcagtccgttactgctgtccaccacgcagtggcaggtccttccgtgttcttttacgaccctgccagccttgtccaccggcctctccacctccaccagaacattgtggacgtgcagtacttgtacggggtagggtcaagcatcgcgtcctgggccattaagtgggagtacgtcgttctcctgttccttctgcttgcagacgcgcgcgtctgtcctgcttgtggatgatgttactcatatcccaagcggaggcggctttggagaacctcgtagtactcaatgcagcatccctggccgggacgcacggtcttgtgtccttcctcgtgttcttctgctttgcgtggtatctgaaggtaggtgggcgcccggagcggtctacgccctctacgggatgtggcctctcctcctgctcctgctggcgctgcctcagcgggcatacgcactggacacggaggtggccgcgtcgtgtggcggcgttgtcttgtcgggttgatggcgctgactctgtcaccacattacaagcgcctcatctgctggtgcgtgtggtggcttcagtattttctaaccagagtggaagcgcacctgcacgtgtgggttccccccctcaacgtccgggggggggcgatgccatcatcttactcatgtgtgttatacacccggctctgatatttgacatcaccaaactgctgctggccgtcttcggacccctttggattcttcaagccagtttgctgaaagtcccctacttgtgcgcgttcaaggccttctccgaatctgcgcgctagcgcggaagttagccggaggtcattacgtgcagatggccatcatcaagttaggggcgcttactggcacctatgtctataaccatctcactcctctccgagactggcgcacaacggcctgcaagacctggccgtggctgtagaaccagtcatcttctcccgaatggagaccaaactcatcacgtggggggcagacaccgccgcgtgcggcgacatcatcaacggcttgcccgttccgcccgcaggggccgggagatattgcttggaccagccgacggaatggcctctaaagggtggaggttgctggcgcccatcacagcgtacgcccagcagacgagaggcctcctagggtgcataatcaccagcctgactggcgggataaaaaccaagtggagggtgaggtccagatcgtgtcaactgctacccaaaccttcctggcaacgtgcatcaatggggtatgctggactgtctaccacggggccggaacgaggaccatcgcatccccaggggtcctgttatccagatgtacaccaatgtggaccaggaccttgtgggctggcctgctcctcaaggttcccgctcattgacaccctgcacctgcggctcctcggacctttacctggtcacgaggcacgccgatgtcttcccgtgcgccggcgaggtgatagcaggggcagcttgctctcgccccggcccatttcctacttgaaaggctcctcggggggtccgctgttgtgccccgcgggacacgccgtgggcatatttagggcgcggtgtgcacccgtggtgtggctaaggcggtggacttcatccctgtggagaacctagagacaaccatgagatccccggtgttcacggacaactcttctccaccagcagtgccccagagcttccaggtggctcacctgcatctcccactggcagcggcaagagcaccaaggtcccggctgcgtacgcagctcagggctacaaagtgctagtgctcaacccctctgttgctgcaacattgggctttggtgcttacatgtccaaggctcaggggtcgatcctaatgtcaggacgggggtgcgaacaattaccaccggcagccccatcacgtactccacctacggcaagttccttgccgacggcgggtgctcaggaggtgcttatgacataataatttgtgatgagtgccacccacggatgccacatccatcttgggcatcggcactgtccttgaccaagcagagaccgcgggggcgagactggttgtgctcgccactgctacccctccgggctccgtcaccgtgccccatcctaacatgaggaggttgctctgtccaccaccggagagatccctttttacggcaaggctattcccctcgaggtcatcaaggggggaaggcatctcatcttctgccactcaaagaaaaagtgtgacgagctcgccgcaaagctggtcgcatgggcatcaatgccgtggcctactaccgcggtcttgacgtgtctgtcatcccgaccagcggcgatgttgtcgtcgtggcgaccgatgctctcatgactggctataccggcgacttcgactctgtgatgactgcaacacgtgtgtcacccagacagtcgatttcagccttgaccctaccttcaccattgagacaaccacgctcccccaagacgctgtctcccggactcaacgtcggggcagaaccggcagggggaagccaggcatctacgatttgtggcaccgggggaacgcccctccggcatgttcgactcgtccgtcatctgtgagtgctatgacgcgggctgtgcttggtatgagctcacgcccgccgagactacagttaggctacgagcgtaatgaacaccccggggctccccgtgtgccaggaccatcttgaattttgggagggcgtctttacgggcctcacccatatagatgcccactttctatcccagacaaagcagagtggagagaacttcccttacctggtagcgtacaagccaccgtgtgcgctagggctcaagcccctcccccatcgtgggaccagatgtggaagtgtttgatccgcctcaaacccaccctccatgggccaacacccctgctatacagactgggcgctgttcaaatgaagtcaccctgacgcacccagtcaccaaatacatcatgacatgcatgtcggctga

SEQ ID NO: 112 - DNA, 4869 bp, Hepatitis C virus
tcgcccacaggacgtcaagttcccgggtggcggtcagatcgttggtggagtttacttgttgccgcgcaggggccctagattgggtgtgcgcgcgacgaggaagacttccgagcggtcgcaacctcgagtagacgtcagcctatccccaaggcgcgtcggcccgagggcaggtcctgggctcagcccgggtacccttggcccctctatggcaatgagggttgcgggtgggcgggatggctcctgtctccccgtggtctcggcctagctggggccccacagacccccggcgtaggtcgcgcaatttgggtaaggtcatcgatacccttacgtgcggcttcgccgacctcatggggtacataccgctcgtcggcgcccctctcggaggcgctgccaggccctggcgcatggcgtcagggttctggaagacggcgtgaactatgcaacagggaatcttcctggttgctctttctctatcttccttctggctctgctctcttgcctgaccgtgcccgcttcagcctacaagtgcgcaactcttcggggctttaccatgtcaccaatgattgccctaactcgagtattgtgtacgaggcggccgatgccattctgcacactccggggtgtgtcccttgtgtttacgagggtaacacctcgaggtgttggtggcggtgacccccacagtggccaccagggacggcaaactccccacgacgcagcttcgacgccacatcgatctgcttgtcgggagtgccaccctctgctcggccctctacgtgggggatctgtgcggtctgtctttcttgtcggccaactgttcaccttctctcccaggcgccaccggacgatgcagaactgcaattgttctatctaccccggccatataacgggccaccgcatggcatgggatatgatgatgaactggtcccctacgtggcattggcggtagctcagctgctccggatcccacaagccatcatggacatgatcgctggtgctcactggggagtcctggcgggcatagcgtatttctccatggtggggaactgggcgaaggtcctgtagtgctgctgctatttgccggcgtcgacgcggagacccacgtcaccgggggagctgccggccgctccacggctgggattgctggtctcttcagcccaggcgccagacagaacatccaactgatcaataccaacggcagtggcacatcaatagcacggccctgaactgcaacgacagcctcaacaccggctggatagcagggctcttctattccaacaaattcaactcttcgggctgtcccgagaggttggccagctgccgacgcctgccgattttgcccagggctggggccccatcagttacgccaacggaagcggccccgacgaacgcccctactgctggcactaccccccaagaccttgtggtattgtgcccgctaagagcgtgtgtggcccggtgtattgcttcctcccagccccgtggtggtgggaacgaccgacaggtcgggcgcgcctacctacaactggggtgaaaatgacacggacgtcttcgtcctcaacaacaccaggccgccgctgggcaattggttcggttgacctggatgaactcaagtggattcaccaaagtgtgcggagcgcccccttgtgtcatcggaggggtgggcaacaacaccttgcgctgccccactgattgcttccgcaaacatccggaagccacatactctcggtgcggctccgtccttggatcacacccaggtgcatggtcgactacccatataggctttggcattatccttgtaccatcaactacaccttattcaaagtcaggatgtacgtgggaggggtcgagcacaggctggaagcgcctgcaactggacgcggggcgaacgctgtgatctggaagacagggacaggtccgagctcagtccgttactgctgtccaccacgcagtggcaggtccttccgtgttcttttacgaccctgccagccttgtccaccggcctctccacctccaccagaacattgtggacgtgcagtacttgtacggggtagggtcaagcatcgcgtcctgggccattaagtgggagtacgtcgttctcctgttccttctgcttgcagacgcgcgcgtctgtcctgcttgtggatgatgttactcatatcccaagcggaggcggctttggagaacctcgtagtactcaatgcagcatccctggccgggacgcacggtcttgtgtccttcctcgtgttcttctgctttgcgtggtatctgaaggtaggtgggcgcccggagcggtctacgccctctacgggatgtggcctctcctcctgctcctgctggcgctgcctcagcgggcatacgcactggacacggaggtggccgcgtcgtgtggcggcgttgtcttgtcgggttgatggcgctgactctgtcaccacattacaagcgcctcatctgctggtgcgtgtggtggcttcagtattttctaaccagagtggaagcgcacctgcacgtgtgggttccccccctcaacgtccgggggggggcgatgccatcatcttactcatgtgtgttatacacccggctctgatatttgacatcaccaaactgctgctggccgtcttcggacccctttggattcttcaagccagtttgctgaaagtcccctacttgtgcgcgttcaaggccttctccgaatctgcgcgctagcgcggaagttagccggaggtcattacgtgcagatggccatcatcaagttaggggcgcttactggcacctatgtctataaccatctcactcctctccgagactggcgcacaacggcctgcaagacctggccgtggctgtagaaccagtcatcttctcccgaatggagaccaaactcatcacgtggggggcagacaccgccgcgtgcggcgacatcatcaacggcttgcccgttccgcccgcaggggccgggagatattgcttggaccagccgacggaatggcctctaaagggtggaggttgctggcgcccatcacagcgtacgcccagcagacgagaggcctcctagggtgcataatcaccagcctgactggcgggataaaaaccaagtggagggtgaggtccagatcgtgtcaactgctacccaaaccttcctggcaacgtgcatcaatggggtatgctggactgtctaccacggggccggaacgaggaccatcgcatccccaggggtcctgttatccagatgtacaccaatgtggaccaggaccttgtgggctggcctgctcctcaaggttcccgctcattgacaccctgcacctgcggctcctcggacctttacctggtcacgaggcacgccgatgtcttcccgtgcgccggcgaggtgatagcaggggcagcttgctctcgccccggcccatttcctacttgaaaggctcctcggggggtccgctgttgtgccccgcgggacacgccgtgggcatatttagggcgcggtgtgcacccgtggtgtggctaaggcggtggacttcatccctgtggagaacctagagacaaccatgagatccccggtattcacggacaactcttctccaccagcagtgccccagagcttccaggtggctcacctgcatctcccactggcagcggcaagagcaccaaggtcccggctgcgtacgcagctcagggctacaaagtgctagtgctcaacccctctgttgctgcaacattgggctttggtgcttacatgtccaaggctcaggggtcgatcctaatgtcaggacgggggtgcgaacaattaccaccggcagccccatcacgtactccacctacggcaagttccttgccgacggcgggtgctcaggaggtgcttatgacataataatttgtgatgagtgccacccacggatgccacatccatcttgggcatcggcactgtccttgaccaagcagagaccgcgggggcgagactggttgtgctcgccactgctacccctccgggctccgtcaccgtgccccatcctaacatgaggaggttgctctgtccaccaccggagagatccctttttacggcaaggctattcccctcgaggtcatcaaggggggaaggcatctcatcttctgccactcaaagaaaaagtgtgacgagctcgccgcaaagctggtcgcatgggcatcaatgccgtggcctactaccgcggtcttgacgtgtctgtcatcccgaccagcggcgatgttgtcgtcgtggcgaccgatgctctcatgactggctataccggcgacttcgactctgtgatgactgcaacacgtgtgtcacccagacagtcgatttcagccttgaccctaccttcaccattgagacaaccacgctcccccaagacgctgtctcccggactcaacgtcggggcagaaccggcagggggaagccaggcatctacgatttgtggcaccgggggaacgcccctccggcatgttcgactcgtccgtcatctgtgagtgctatgacgcgggctgtgcttggtatgagctcacgcccgccgagactacagttaggctacgagcgtaatgaacaccccggggctccccgtgtgccaggaccatcttgaattttgggagggcgtctttacgggcctcacccatatagatgcccactttctatcccagacaaagcagagtggagagaacttcccttacctggtagcgtacaagccaccgtgtgcgctagggctcaagcccctcccccatcgtgggaccagatgtggaagtgtttgatccgcctcaaacccaccctccatgggccaacacccctgctatacagactgggcgctgttcaaatgaagtcaccctgacgcacccagtcaccaaatacatcatgacatgcatgtcggctga

SEQ ID NO: 113 - DNA, 4869 bp, Hepatitis C virus
tcgcccacaggacgtcaagttcccgggtggcggtcagatcgttggtggagtttacttgttgccgcgcaggggccctagattgggtgtgcgcgcgacgaggaagacttccgagcggtcgcaacctcgagtagacgtcagcctatccccaaggcgcgtcggcccgagggcaggtcctgggctcagcccgggtacccttggcccctctatggcaatgagggttgcgggtgggcgggatggctcctgtctccccgtggtctcggcctagctggggccccacagacccccggcgtaggtcgcgcaatttgggtaaggtcatcgatacccttacgtgcggcttcgccgacctcatggggtacataccgctcgtcggcgcccctctcggaggcgctgccaggccctggcgcatggcgtcagggttctggaagacggcgtgaactatgcaacagggaatcttcctggttgctctttctctatcttccttctggctctgctctcttgcctgaccgtgcccgcttcagcctacaagtgcgcaactcttcggggctttaccatgtcaccaatgattgccctaactcgagtattgtgtacgaggcggccgatgccattctgcacactccggggtgtgtcccttgtgtttacgagggtaacacctcgaggtgttggtggcggtgacccccacagtggccaccagggacggcaaactccccacgacgcagcttcgacgccacatcgatctgcttgtcgggagtgccaccctctgctcggccctctacgtgggggatctgtgcggtctgtctttcttgtcggccaactgttcaccttctctcccaggcgccaccggacgatgcagaactgcaattgttctatctaccccggccatataacgggccaccgcatggcatgggatatgatgatgaactggtcccctacgtggcattggcggtagctcagctgctccggatcccacaagccatcatggacatgatcgctggtgctcactggggagtcctggcgggcatagcgtatttctccatggtggggaactgggcgaaggtcctgtagtgctgctgctatttgccggcgtcgacgcggagacccacgtcaccgggggagctgccggccgctccacggctgggattgctggtctcttcagcccaggcgccagacagaacatccaactgatcaataccaacggcagtggcacatcaatagcacggccctgaactgcaacgacagcctcaacaccggctggatagcagggctcttctattccaacaaattcaactcttcgggctgtcccgagaggttggccagctgccgacgcctgccgattttgcccagggctggggccccatcagttacgccaacggaagcggccccgacgaacgcccctactgctggcactaccccccaagaccttgtggtattgtgcccgctaagagcgtgtgtggcccggtgtattgcttcctcccagccccgtggtggtgggaacgaccgacaggtcgggcgcgcctacctacaactggggtgaaaatgacacggacgtcttcgtcctcaacaacaccaggccgccgctgggcaattggttcggttgacctggatgaactcaagtggattcaccaaagtgtgcggagcgcccccttgtgtcatcggaggggtgggcaacaacaccttgcgctgccccactgattgcttccgcaaacatccggaagccacatactctcggtgcggctccgtccttggatcacacccaggtgcatggtcgactacccatataggctttggcattatccttgtaccatcaactacaccttattcaaagtcaggatgtacgtgggaggggtcgagcacaggctggaagcgcctgcaactggacgcggggcgaacgctgtgatctggaagacagggacaggtccgagctcagtccgttactgctgtccaccacgcagtggcaggtccttccgtgttcttttacgaccctgccagccttgtccaccggcctctccacctccaccagaacattgtggacgtgcagtacttgtacggggtagggtcaagcatcgcgtcctgggccattaagtgggagtacgtcgttctcctgttccttctgcttgcagacgcgcgcgtctgtcctgcttgtggatgatgttactcatatcccaagcggaggcggctttggagaacctcgtagtactcaatgcagcatccctggccgggacgcacggtcttgtgtccttcctcgtgttcttctgctttgcgtggtatctgaaggtaggtgggcgcccggagcggtctacgccctctacgggatgtggcctctcctcctgctcctgctggcgctgcctcagcgggcatacgcactggacacggaggtggccgcgtcgtgtggcggcgttgtcttgtcgggttgatggcgctgactctgtcaccacattacaagcgcctcatctgctggtgcgtgtggtggcttcagtattttctaaccagagtggaagcgcacctgcacgtgtgggttccccccctcaacgtccgggggggggcgatgccatcatcttactcatgtgtgttatacacccggctctgatatttgacatcaccaaactgctgctggccgtcttcggacccctttggattcttcaagccagtttgctgaaagtcccctacttgtgcgcgttcaaggccttctccgaatctgcgcgctagcgcggaagttagccggaggtcattacgtgcagatggccatcatcaagttaggggcgcttactggcacctatgtctataaccatctcactcctctccgagactggcgcacaacggcctgcaagacctggccgtggctgtagaaccagtcatcttctcccgaatggagaccaaactcatcacgtggggggcagacaccgccgcgtgcggcgacatcatcaacggcttgcccgttccgcccgcaggggccgggagatattgcttggaccagccgacggaatggcctctaaagggtggaggttgctggcgcccatcacagcgtacgcccagcagacgagaggcctcctagggtgcataatcaccagcctgactggcgggataaaaaccaagtggagggtgaggtccagatcgtgtcaactgctacccaaaccttcctggcaacgtgcatcaatggggtatgctggactgtctaccacggggccggaacgaggaccatcgcatccccaggggtcctgttatccagatgtacaccaatatggaccaggaccttgtgggctggcctgctcctcaaggttcccgctcattgacaccctgcacctgcggctcctcggacctttacctggtcacgaggcacgccgatgtcttcccgtgcgccggcgaggtgatagcaggggcagcttgctctcgccccggcccatttcctacttgaaaggctcctcggggggtccgctgttgtgccccgcgggacacgccgtgggcatatttagggcgcggtgtgcacccgtggtgtggctaaggcggtggacttcatccctgtggagaacctagagacaaccatgagatccccggtgttcacggacaactcttctccaccagcagtgccccagagcttccaggtggctcacctgcatctcccactggcagcggcaagagcaccaaggtcccggctgcgtacgcagctcagggctacaaagtgctagtgctcaacccctctgttgctgcaacattgggctttggtgcttacatgtccaaggctcaggggtcgatcctaatgtcaggacgggggtgcgaacaattaccaccggcagccccatcacgtactccacctacggcaagttccttgccgacggcgggtgctcaggaggtgcttatgacataataatttgtgatgagtgccacccacggatgccacatccatcttgggcatcggcactgtccttgaccaagcagagaccgcgggggcgagactggttgtgctcgccactgctacccctccgggctccgtcaccgtgccccatcctaacatgaggaggttgctctgtccaccaccggagagatccctttttacggcaaggctattcccctcgaggtcatcaaggggggaaggcatctcatcttctgccactcaaagaaaaagtgtgacgagctcgccgcaaagctggtcgcatgggcatcaatgccgtggcctactaccgcggtcttgacgtgtctgtcatcccgaccagcggcgatgttgtcgtcgtggcgaccgatgctctcatgactggctataccggcgacttcgactctgtgatgactgcaacacgtgtgtcacccagacagtcgatttcagccttgaccctaccttcaccattgagacaaccacgctcccccaagacgctgtctcccggactcaacgtcggggcagaaccggcagggggaagccaggcatctacgatttgtggcaccgggggaacgcccctccggcatgttcgactcgtccgtcatctgtgagtgctatgacgcgggctgtgcttggtatgagctcacgcccgccgagactacagttaggctacgagcgtaatgaacaccccggggctccccgtgtgccaggaccatcttgaattttgggagggcgtctttacgggcctcacccatatagatgcccactttctatcccagacaaagcagagtggagagaacttcccttacctggtagcgtacaagccaccgtgtgcgctagggctcaagcccctcccccatcgtgggaccagatgtggaagtgtttgatccgcctcaaacccaccctccatgggccaacacccctgctatacagactgggcgctgttcaaatgaagtcaccctgacgcacccagtcaccaaatacatcatgacatgcatgtcggctga

SEQ ID NO: 114 - DNA, 4869 bp, Hepatitis C virus
tcgcccacaggacgtcaagttcccgggtggcggtcagatcgttggtggagtttacttgttgccgcgcaggggccctagattgggtgtgcgcgcgacgaggaagacttccgagcggtcgcaacctcgagtagacgtcagcctatccccaaggcgcgtcggcccgagggcaggtcctgggctcagcccgggtacccttggcccctctatggcaatgagggttgcgggtgggcgggatggctcctgtctccccgtggtctcggcctagctggggccccacagacccccggcgtaggtcgcgcaatttgggtaaggtcatcgatacccttacgtgcggcttcgccgacctcatggggtacataccgctcgtcggcgcccctctcggaggcgctgccaggccctggcgcatggcgtcagggttctggaagacggcgtgaactatgcaacagggaatcttcctggttgctctttctctatcttccttctggctctgctctcttgcctgaccgtgcccgcttcagcctacaagtgcgcaactcttcggggctttaccatgtcaccaatgattgccctaactcgagtattgtgtacgaggcggccgatgccattctgcacactccggggtgtgtcccttgtgtttacgagggtaacacctcgaggtgttggtggcggtgacccccacagtggccaccagggacggcaaactccccacgacgcagcttcgacgccacatcgatctgcttgtcgggagtgccaccctctgctcggccctctacgtgggggatctgtgcggtctgtctttcttgtcggccaactgttcaccttctctcccaggcgccaccggacgatgcagaactgcaattgttctatctaccccggccatataacgggccaccgcatggcatgggatatgatgatgaactggtcccctacgtggcattggcggtagctcagctgctccggatcccacaagccatcatggacatgatcgctggtgctcactggggagtcctggcgggcatagcgtatttctccatggtggggaactgggcgaaggtcctgtagtgctgctgctatttgccggcgtcgacgcggagacccacgtcaccgggggagctgccggccgctccacggctgggattgctggtctcttcagcccaggcgccagacagaacatccaactgatcaataccaacggcagtggcacatcaatagcacggccctgaactgcaacgacagcctcaacaccggctggatagcagggctcttctattccaacaaattcaactcttcgggctgtcccgagaggttggccagctgccgacgcctgccgattttgcccagggctggggccccatcagttacgccaacggaagcggccccgacgaacgcccctactgctggcactaccccccaagaccttgtggtattgtgcccgctaagagcgtgtgtggcccggtgtattgcttcctcccagccccgtggtggtgggaacgaccgacaggtcgggcgcgcctacctacaactggggtgaaaatgacacggacgtcttcgtcctcaacaacaccaggccgccgctgggcaattggttcggttgacctggatgaactcaagtggattcaccaaagtgtgcggagcgcccccttgtgtcatcggaggggtgggcaacaacaccttgcgctgccccactgattgcttccgcaaacatccggaagccacatactctcggtgcggctccgtccttggatcacacccaggtgcatggtcgactacccatataggctttggcattatccttgtaccatcaactacaccttattcaaagtcaggatgtacgtgggaggggtcgagcacaggctggaagcgcctgcaactggacgcggggcgaacgctgtgatctggaagacagggacaggtccgagctcagtccgttactgctgtccaccacgcagtggcaggtccttccgtgttcttttacgaccctgccagccttgtccaccggcctctccacctccaccagaacattgtggacgtgcagtacttgtacggggtagggtcaagcatcgcgtcctgggccattaagtgggagtacgtcgttctcctgttccttctgcttgcagacgcgcgcgtctgtcctgcttgtggatgatgttactcatatcccaagcggaggcggctttggagaacctcgtagtactcaatgcagcatccctggccgggacgcacggtcttgtgtccttcctcgtgttcttctgctttgcgtggtatctgaaggtaggtgggcgcccggagcggtctacgccctctacgggatgtggcctctcctcctgctcctgctggcgctgcctcagcgggcatacgcactggacacggaggtggccgcgtcgtgtggcggcgttgtcttgtcgggttgatggcgctgactctgtcaccacattacaagcgcctcatctgctggtgcgtgtggtggcttcagtattttctaaccagagtggaagcgcacctgcacgtgtgggttccccccctcaacgtccgggggggggcgatgccatcatcttactcatgtgtgttatacacccggctctgatatttgacatcaccaaactgctgctggccgtcttcggacccctttggattcttcaagccagtttgctgaaagtcccctacttgtgcgcgttcaaggccttctccgaatctgcgcgctagcgcggaagttagccggaggtcattacgtgcagatggccatcatcaagttaggggcgcttactggcacctatgtctataaccatctcactcctctccgagactggcgcacaacggcctgcgagacctggccgtggctgtagaaccagtcatcttctcccgaatggagaccaaactcatcacgtggggggcagacaccgccgcgtgcggcgacatcatcaacggcttgcccgttccgcccgcaggggccgggagatattgcttggaccagccgacggaatggcctctaaagggtggaggttgctggcgcccatcacagcgtacgcccagcagacgagaggcctcctagggtgcataatcaccagcctgactggcgggataaaaaccaagtggagggtgaggtccagatcgtgtcaactgctacccaaaccttcctggcaacgtgcatcaatggggtatgctggactgtctaccacggggccggaacgaggaccatcgcatccccaggggtcctgttatccagatgtacaccaatgtggaccaggaccttgtgggctggcctgctcctcaaggttcccgctcattgacaccctgcacctgcggctcctcggacctttacctggtcacgaggcacgccgatgtcttcccgtgcgccggcgaggtgatagcaggggcagcttgctctcgccccggcccatttcctacttgaaaggctcctcggggggtccgctgttgtgccccgcgggacacgccgtgggcatatttagggcgcggtgtgcacccgtggtgtggctaaggcggtggacttcatccctgtggagaacctagagacaaccatgagatccccggtgttcacggacaactcttctccaccagcagtgccccagagcttccaggtggctcacctgcatctcccactggcagcggcaagagcaccaaggtcccggctgcgtacgcagctcagggctacaaagtgctagtgctcaacccctctgttgctgcaacattgggctttggtgcttacatgtccaaggctcaggggtcgatcctaatgtcaggacgggggtgcgaacaattaccaccggcagccccatcacgtactccacctacggcaagttccttgccgacggcgggtgctcaggaggtgcttatgacataataatttgtgatgagtgccacccacggatgccacatccatcttgggcatcggcactgtccttgaccaagcagagaccgcgggggcgagactggttgtgctcgccactgctacccctccgggctccgtcaccgtgccccatcctaacatgaggaggttgctctgtccaccaccggagagatccctttttacggcaaggctattcccctcgaggtcatcaaggggggaaggcatctcatcttctgccactcaaagaaaaagtgtgacgagctcgccgcaaagctggtcgcatgggcatcaatgccgtggcctactaccgcggtcttgacgtgtctgtcatcccgaccagcggcgatgttgtcgtcgtggcgaccgatgctctcatgactggctataccggcgacttcgactctgtgatgactgcaacacgtgtgtcacccagacagtcgatttcagccttgaccctaccttcaccattgagacaaccacgctcccccaagacgctgtctcccggactcaacgtcggggcagaaccggcagggggaagccaggcatctacgatttgtggcaccgggggaacgcccctccggcatgttcgactcgtccgtcatctgtgagtgctatgacgcgggctgtgcttggtatgagctcacgcccgccgagactacagttaggctacgagcgtaatgaacaccccggggctccccgtgtgccaggaccatcttgaattttgggagggcgtctttacgggcctcacccatatagatgcccactttctatcccagacaaagcagagtggagagaacttcccttacctggtagcgtacaagccaccgtgtgcgctagggctcaagcccctcccccatcgtgggaccagatgtggaagtgtttgatccgcctcaaacccaccctccatgggccaacacccctgctatacagactgggcgctgttcaaatgaagtcaccctgacgcacccagtcaccaaatacatcatgacatgcatgtcggctga

SEQ ID NO: 115 - DNA, 4869 bp, Hepatitis C virus
tcgcccacaggacgtcaagttcccgggtggcggtcagatcgttggtggagtttacttgttgccgcgcaggggccctagattgggtgtgcgcgcgacgaggaagacttccgagcggtcgcaacctcgagtagacgtcagcctatccccaaggcgcgtcggcccgagggcaggtcctgggctcagcccgggtacccttggcccctctatggcaatgagggttgcgggtgggcgggatggctcctgtctccccgtggtctcggcctagctggggccccacagacccccggcgtaggtcgcgcaatttgggtaaggtcatcgatacccttacgtgcggcttcgccgacctcatggggtacataccgctcgtcggcgcccctctcggaggcgctgccaggccctggcgcatggcgtcagggttctggaagacggcgtgaactatgcaacagggaatcttcctggttgctctttctctatcttccttctggctctgctctcttgcctgaccgtgcccgcttcagcctacaagtgcgcaactcttcggggctttaccatgtcaccaatgattgccctaactcgagtattgtgtacgaggcggccgatgccattctgcacactccggggtgtgtcccttgtgtttacgagggtaacacctcgaggtgttggtggcggtgacccccacagtggccaccagggacggcaaactccccacgacgcagcttcgacgccacatcgatctgcttgtcgggagtgccaccctctgctcggccctctacgtgggggatctgtgcggtctgtctttcttgtcggccaactgttcaccttctctcccaggcgccaccggacgatgcagaactgcaattgttctatctaccccggccatataacgggccaccgcatggcatgggatatgatgatgaactggtcccctacgtggcattggcggtagctcagctgctccggatcccacaagccatcatggacatgatcgctggtgctcactggggagtcctggcgggcatagcgtatttctccatggtggggaactgggcgaaggtcctgtagtgctgctgctatttgccggcgtcgacgcggagacccacgtcaccgggggagctgccggccgctccacggctgggattgctggtctcttcagcccaggcgccagacagaacatccaactgatcaataccaacggcagtggcacatcaatagcacggccctgaactgcaacgacagcctcaacaccggctggatagcagggctcttctattccaacaaattcaactcttcgggctgtcccgagaggttggccagctgccgacgcctgccgattttgcccagggctggggccccatcagttacgccaacggaagcggccccgacgaacgcccctactgctggcactaccccccaagaccttgtggtattgtgcccgctaagagcgtgtgtggcccggtgtattgcttcctcccagccccgtggtggtgggaacgaccgacaggtcgggcgcgcctacctacaactggggtgaaaatgacacggacgtcttcgtcctcaacaacaccaggccgccgctgggcaattggttcggttgacctggatgaactcaagtggattcaccaaagtgtgcggagcgcccccttgtgtcatcggaggggtgggcaacaacaccttgcgctgccccactgattgcttccgcaaacatccggaagccacatactctcggtgcggctccgtccttggatcacacccaggtgcatggtcgactacccatataggctttggcattatccttgtaccatcaactacaccttattcaaagtcaggatgtacgtgggaggggtcgagcacaggctggaagcgcctgcaactggacgcggggcgaacgctgtgatctggaagacagggacaggtccgagctcagtccgttactgctgtccaccacgcagtggcaggtccttccgtgttcttttacgaccctgccagccttgtccaccggcctctccacctccaccagaacattgtggacgtgcagtacttgtacggggtagggtcaagcatcgcgtcctgggccattaagtgggagtacgtcgttctcctgtttcttctgcttgcagacgcgcgcgtctgtcctgcttgtggatgatgttactcatatcccaagcggaggcggctttggagaacctcgtagtactcaatgcagcatccctggccgggacgcacggtcttgtgtccttcctcgtgttcttctgctttgcgtggtatctgaaggtaggtgggcgcccggagcggtctacgccctctacgggatgtggcctctcctcctgctcctgctggcgctgcctcagcgggcatacgcactggacacggaggtggccgcgtcgtgtggcggcgttgtcttgtcgggttgatggcgctgactctgtcaccacattacaagcgcctcatctgctggtgcgtgtggtggcttcagtattttctaaccagagtggaagcgcacctgcacgtgtgggttccccccctcaacgtccgggggggggcgatgccatcatcttactcatgtgtgttatacacccggctctgatatttgacatcaccaaactgctgctggccgtcttcggacccctttggattcttcaagccagtttgctgaaagtcccctacttgtgcgcgttcaaggccttctccgaatctgcgcgctagcgcggaagttagccggaggtcattacgtgcagatggccatcatcaagttaggggcgcttactggcacctatgtctataaccatctcactcctctccgagactggcgcacaacggcctgcaagacctggccgtggctgtagaaccagtcatcttctcccgaatggagaccaaactcatcacgtggggggcagacaccgccgcgtgcggcgacatcatcaacggcttgcccgttccgcccgcaggggccgggagatattgcttggaccagccgacggaatggcctctaaagggtggaggttgctggcgcccatcacagcgtacgcccagcagacgagaggcctcctagggtgcataatcaccagcctgactggcgggataaaaaccaagtggagggtgaggtccagatcgtgtcaactgctacccaaaccttcctggcaacgtgcatcaatggggtatgctggactgtctaccacggggccggaacgaggaccatcgcatccccaggggtcctgttatccagatgtacaccaatgtggaccaggaccttgtgggctggcctgctcctcaaggttcccgctcattgacaccctgcacctgcggctcctcggacctttacctggtcacgaggcacgccgatgtcttcccgtgcgccggcgaggtgatagcaggggcagcttgctctcgccccggcccatttcctacttgaaaggctcctcggggggtccgctgttgtgccccgcgggacacgccgtgggcatatttagggcgcggtgtgcacccgtggtgtggctaaggcggtggacttcatccctgtggagaacctagagacaaccatgagatccccggtgttcacggacaactcttctccaccagcagtgccccagagcttccaggtggctcacctgcatctcccactggcagcggcaagagcaccaaggtcccggctgcgtacgcagctcagggctacaaagtgctagtgctcaacccctctgttgctgcaacattgggctttggtgcttacatgtccaaggctcaggggtcgatcctaatgtcaggacgggggtgcgaacaattaccaccggcagccccatcacgtactccacctacggcaagttccttgccgacggcgggtgctcaggaggtgcttatgacataataatttgtgatgagtgccacccacggatgccacatccatcttgggcatcggcactgtccttgaccaagcagagaccgcgggggcgagactggttgtgctcgccactgctacccctccgggctccgtcaccgtgccccatcctaacatgaggaggttgctctgtccaccaccggagagatccctttttacggcaaggctattcccctcgaggtcatcaaggggggaaggcatctcatcttctgccactcaaagaaaaagtgtgacgagctcgccgcaaagctggtcgcatgggcatcaatgccgtggcctactaccgcggtcttgacgtgtctgtcatcccgaccagcggcgatgttgtcgtcgtggcgaccgatgctctcatgactggctataccggcgacttcgactctgtgatgactgcaacacgtgtgtcacccagacagtcgatttcagccttgaccctaccttcaccattgagacaaccacgctcccccaagacgctgtctcccggactcaacgtcggggcagaaccggcagggggaagccaggcatctacgatttgtggcaccgggggaacgcccctccggcatgttcgactcgtccgtcatctgtgagtgctatgacgcgggctgtgcttggtatgagctcacgcccgccgagactacagttaggctacgagcgtaatgaacaccccggggctccccgtgtgccaggaccatcttgaattttgggagggcgtctttacgggcctcacccatatagatgcccactttctatcccagacaaagcagagtggagagaacttcccttacctggtagcgtacaagccaccgtgtgcgctagggctcaagcccctcccccatcgtgggaccagatgtggaagtgtttgatccgcctcaaacccaccctccatgggccaacacccctgctatacagactgggcgctgttcaaatgaagtcaccctgacgcacccagtcaccaaatacatcatgacatgcatgtcggctga

SEQ ID NO: 116 - DNA, 4869 bp, Hepatitis C virus; identical to SEQ ID NO: 96

SEQ ID NO: 117 - DNA, 4869 bp, Hepatitis C virus; identical to SEQ ID NO: 96

SEQ ID NO: 118 - DNA, 4860 bp, Hepatitis C virus
tcgcccacaggacgtcaagttcccgggtggcggtcagatcgttggtggagtttacttgttgccgcgcaggggccctagattgggtgtgcgcgcgacgaggaagacttccgagcggtcgcaacctcgagtagacgtcagcctatccccaaggcgcgtcggcccgagggcaggtcctgggctcagcccgggtacccttggcccctctatggcaatgagggttgcgggtgggcgggatggctcctgtctccccgtggtctcggcctagctggggccccacagacccccggcgtaggtcgcgcaatttgggtaaggtcatcgatacccttacgtgcggcttcgccgacctcatggggtacataccgctcgtcggcgcccctctcggaggcgctgccaggccctggcgcatggcgtcagggttctggaagacggcgtgaactatgcaacagggaatcttcctggttgctctttctctatcttccttctggctctgctctcttgcctgaccgtgcccgcttcagcctacaagtgcgcaactcttcggggctttaccatgtcaccaatgattgccctaactcgagtattgtgtacgaggcggccgatgccattctgcacactccggggtgtgtcccttgtgtttacgagggtaacacctcgaggtgttggtggcggtgacccccacagtggccaccagggacggcaaactccccacgacgcagcttcgacgccacatcgatctgcttgtcgggagtgccaccctctgctcggccctctacgtgggggatctgtgcggtctgtctttcttgtcggccaactgttcaccttctctcccaggcgccaccggacgatgcagaactgcaattgttctatctaccccggccatataacgggccaccgcatggcatgggatatgatgatgaactggtcccctacgtggcattggcggtagctcagctgctccggatcccacaagccatcatggacatgatcgctggtgctcactggggagtcctggcgggcatagcgtatttctccatggtggggaactgggcgaaggtcctgtagtgctgctgctatttgccggcgtcgacgcggagacccacgtcaccgggggagctgccggccgctccacggctgggattgctggtctcttcagcccaggcgccagacagaacatccaactgatcaataccaacggcagtggcacatcaatagcacggccctgaactgcaacgacagcctcaacaccggctggatagcagggctcttctattccaacaaattcaactcttcgggctgtcccgagaggttggccagctgccgacgcctgccgattttgcccagggctggggccccatcagttacgccaacggaagcggccccgacgaacgcccctactgctggcactaccccccaagaccttgtggtattgtgcccgctaagagcgtgtgtggcccggtgtattgcttcctcccagccccgtggtggtgggaacgaccgacaggtcgggcgcgcctacctacaactggggtgaaaatgacacggacgtcttcgtcctcaacaacaccaggccgccgctgggcaattggttcggttgacctggatgaactcaagtggattcaccaaagtgtgcggagcgcccccttgtgtcatcggaggggtgggcaacaacaccttgcgctgccccactgattgcttccgcaaacatccggaagccacatactctcggtgcggctccgtccttggatcacacccaggtgcatggtcgactacccatataggctttggcattatccttgtaccatcaactacaccttattcaaagtcaggatgtacgtgggaggggtcgagcacaggctggaagcgcctgcaactggacgcggggcgaacgctgtgatctggaagacagggacaggtccgagctcagtccgttactgctgtccaccacgcagtggcaggtccttccgtgttcttttacgaccctgccagccttgtccaccggcctctccacctccaccagaacattgtggacgtgcagtacttgtacggggtagggtcaagcatcgcgtcctgggccattaagtgggagtacgtcgttctcctgttccttctgcttgcagacgcgcgcgtctgtcctgcttgtggatgatgttactcatatcccaagcggaggcggctttggagaacctcgtagtactcaatgcagcatccctggccgggacgcacggtcttgtgtccttcctcgtgttcttctgctttgcgtggtatctgaaggtaggtgggcgcccggagcggtctacgccctctacgggatgtggcctctcctcctgctcctgctggcgctgcctcagcgggcatacgcactggacacggaggtggccgcgtcgtgtggcggcgttgtcttgtcgggttgatggcgctgactctgtcaccacattacaagcgcctcatctgctggtgcgtgtggtggcttcagtattttctaaccagagtggaagcgcacctgcacgtgtgggttccccccctcaacgtccgggggggggcgatgccatcatcttactcatgtgtgttatacacccggctctgatatttgacatcaccaaactgctgctggccgtcttcggacccctttggattcttcaagccagtttgctgaaagtcccctacttgtgcgcgttcaaggccttctccgaatctgcgcgctagcgcggaagttagccggaggtcattacgtgcagatggccatcatcaagttaggggcgcttactggcacctatgtctataaccatctcactcctctccgagactggcgcacaacggcctgcaagacctggccgtggctgtagaaccagtcatcttctcccgaatggagaccaaactcatcacgtggggggcagacaccgccgcgtgcggcgacatcatcaacggcttgcccgttccgcccgcaggggccgggagatattgcttggaccagccgacggaatggcctctaaagggtggaggttgctggcgcccatcacagcgtacgcccagcagacgagaggcctcctagggtgcataatcaccagcctgactggcgggataaaaaccaagtggagggtgaggtccagatcgtgtcaactgctacccaaaccttcctggcaacgtgcatcaatggggtatgctggactgtctaccacggggccggaacgaggaccatcgcatccccaggggtcctgttatccagatgtacaccaatgtggaccaggaccttgtgggctggcctgctcctcaaggttcccgctcattgacaccctgcacctgcggctcctcggacctttacctggtcacgaggcacgccgatgtcttcccgtgcgccggcgaggtgatagcaggggcagcttgctctcgccccggcccatttcctacttgaaaggctcctcggggggtccgctgttgtgccccgcgggacacgccgtgggcatatttagggcgcggtgtgcacccgtggtgtggctaaggcggtggacttcatccctgtggagaacctagagacaaccatgagatccccggtgttcacggacaactcttctccaccagcagtgccccagagcttccaggtggctcacctgcatctcccactggcagcggcaagagcaccaaggtcccggctgcgtacgcagctcagggctacaaagtgctagtgctcaacccctctgttgctgcaacattgggctttggtgcttacatgtccaaggctcaggggtcgatcctaatgtcaggacgggggtgcgaacaattaccaccggcagccccatcacgtactccacctacggcaagttccttgccgacggcgggtgctcaggaggtgcttatgacataataatttgtgatgagtgccacccacggatgccacatccatcttgggcatcggcactgtccttgaccaagcagagaccgcgggggcgagactggttgtgctcgccactgctacccctccgggctccgtcaccgtgccccatcctaacatgaggaggttgctctgtccaccaccggagagatccctttttacggcaaggctattcccctcgaggtcatcaaggggggaaggcatctcatcttctgccactcaaagaaaaagtgtgacgagctcgccgcaaagctggtcgcatgggcatcaatgccgtggcctactaccgcggtcttgacgtgtctgtcatcccgaccagcggcgatgttgtcgtcgtggcgaccgatgctctcatgactggctataccggcgacttcgactctgtgatgactgcaacacgtgtgtcacccagacagtcgatttcagccttgaccctaccttcaccattgagacaaccacgctcccccaagacgctgtctcccggactcaacgtcggggcagaaccggcagggggaagccaggcatctacgatttgtggcaccgggggaacgcccctccggcatgttcgactcgtccgtcatctgtgagtgctatgacgcgggctgtgcttggtatgagctcacgcccgccgagactacagttaggctacgagcgtaatgaacaccccggggctccccgtgtgccaggaccatcttgaattttgggagggcgtctttacgggcctcacccatatagatgcccactttctatcccagacaaagcagagtggagagaacttcccttacctggtagcgtacaagccaccgtgtgcgctagggctcaagcccctcccccatcgtgggaccagatgtggaagtgtttgatccgcctcaaacccaccctccatgggccaacacccctgctatacagactgggcgctgttcaaatgaagtcaccctgacgcacccagtcaccaaatacatcatgacatgcat

SEQ ID NO: 119 - DNA, 4869 bp, Hepatitis C virus; identical to SEQ ID NO: 96

SEQ ID NO: 120 - DNA, 4869 bp, Hepatitis C virus; identical to SEQ ID NO: 96

SEQ ID NO: 121 - DNA, 4869 bp, Hepatitis C virus; identical to SEQ ID NO: 96

SEQ ID NO: 122 - DNA, 4869 bp, Hepatitis C virus; identical to SEQ ID NO: 96

SEQ ID NO: 123 - DNA, 4869 bp, Hepatitis C virus; identical to SEQ ID NO: 96

SEQ ID NO: 124 - DNA, 4869 bp, Hepatitis C virus; identical to SEQ ID NO: 96

SEQ ID NO: 125 - DNA, 4869 bp, Hepatitis C virus; identical to SEQ ID NO: 96

SEQ ID NO: 126 - DNA, 4869 bp, Hepatitis C virus
tcgcccacaggacgtcaagttcccgggtggcggtcagatcgttggtggagtttacttgttgccgcgcaggggccctagattgggtgtgcgcgcgacgaggaagacttccgagcggtcgcaacctcgagtagacgtcagcctatccccaaggcgcgtcggcccgagggcaggtcctgggctcagcccgggtacccttggcccctctatggcaatgagggttgcgggtgggcgggatggctcctgtctccccgtggtctcggcctagctggggccccacagacccccggcgtaggtcgcgcaatttgggtaaggtcatcgatacccttacgtgcggcttcgccgacctcatggggtacataccgctcgtcggcgcccctctcggaggcgctgccaggccctggcgcatggcgtcagggttctggaagacggcgtgaactatgcaacagggaatcttcctggttgctctttctctatcttccttctggctctgctctcttgcctgaccgtgcccgcttcagcctacaagtgcgcaactcttcggggctttaccatgtcaccaatgattgccctaactcgagtattgtgtacgaggcggccgatgccattctgcacactccggggtgtgtcccttgtgtttacgagggtaacacctcgaggtgttggtggcggtgacccccacagtggccaccagggacggcaaactccccacgacgcagcttcgacgccacatcgatctgcttgtcgggagtgccaccctctgctcggccctctacgtgggggatctgtgcggtctgtctttcttgtcggccaactgttcaccttctctcccaggcgccaccggacgatgcagaactgcaattgttctatctaccccggccatataacgggccaccgcatggcatgggatatgatgatgaactggtcccctacgtggcattggcggtagctcagctgctccggatcccacaagccatcatggacatgatcgctggtgctcactggggagtcctggcgggcatagcgtatttctccatggtggggaactgggcgaaggtcctgtagtgctgctgctatttgccggcgtcgacgcggagacccacgtcaccgggggagctgccggccgctccacggctgggattgctggtctcttcagcccaggcgccagacagaacatccaactgatcaataccaacggcagtggcacatcaatagcacggccctgaactgcaacgacagcctcaacaccggctggatagcagggctcttctattccaacaaattcaactcttcgggctgtcccgagaggttggccagctgccgacgcctgccgattttgcccagggctggggccccatcagttacgccaacggaagcggccccgacgaacgcccctactgctggcactaccccccaagaccttgtggtattgtgcccgctaagagcgtgtgtggcccggtgtattgcttcctcccagccccgtggtggtgggaacgaccgacaggtcgggcgcgcctacctacaactggggtgaaaatgacacggacgtcttcgtcctcaacaacaccaggccgccgctgggcaattggttcggttgacctggatgaactcaagtggattcaccaaagtgtgcggagcgcccccttgtgtcatcggaggggtgggcaacaacaccttgcgctgccccactgattgcttccgcaaacatccggaagccacatactctcggtgcggctccgtccttggatcacacccaggtgcatggtcgactacccatataggctttggcattatccttgtaccatcaactacaccttattcaaagtcaggatgtacgtgggaggggtcgagcacaggctggaagcgcctgcaactggacgcggggcgaacgctgtgatctggaagacagggacaggtccgagctcagtccgttactgctgtccaccacgcagtggcaggtccttccgtgttcttttacgaccctgccagccttgtccaccggcctctccacctccaccagaacattgtggacgtgcagtacttgtacggggtagggtcaagcatcgcgtcctgggccattaagtgggagtacgtcgttctcctgttccttctgcttgcagacgcgcgcgtctgtcctgcttgtggatgatgttactcatatcccaagcggaggcggctttggagaacctcgtagtactcaatgcagcatccctggccgggacgcacggtcttgtgtccttcctcgtgttcttctgctttgcgtggtatctgaaggtaggtgggcgcccggagcggtctacgccctctacgggatgtggcctctcctcctgctcctgctggcgctgcctcagcgggcatacgcactggacacggaggtggccgcgtcgtgtggcggcgttgtcttgtcgggttgatggcgctgactctgtcaccacattacaagcgcctcatctgctggtgcgtgtggtggtttcagtattttctaaccagagtggaagcgcacctgcacgtgtgggttccccccctcaacgtccgggggggggcgatgccatcatcttactcatgtgtgttatacacccggctctgatatttgacatcaccaaactgctgctggccgtcttcggacccctttggattcttcaagccagtttgctgaaagtcccctacttgtgcgcgttcaaggccttctccgaatctgcgcgctagcgcggaagttagccggaggtcattacgtgcagatggccatcatcaagttaggggcgcttactggcacctatgtctataaccatctcactcctctccgagactggcgcacaacggcctgcaagacctggccgtggctgtagaaccagtcatcttctcccgaatggagaccaaactcatcacgtggggggcagacaccgccgcgtgcggcgacatcatcaacggcttgcccgttccgcccgcaggggccgggagatattgcttggaccagccgacggaatggcctctaaagggtggaggttgctggcgcccatcacagcgtacgcccagcagacgagaggcctcctagggtgcataatcaccagcctgactggcgggataaaaaccaagtggagggtgaggtccagatcgtgtcaactgctacccaaaccttcctggcaacgtgcatcaatggggtatgctggactgtctaccacggggccggaacgaggaccatcgcatccccaggggtcctgttatccagatgtacaccaatgtggaccaggaccttgtgggctggcctgctcctcaaggttcccgctcattgacaccctgcacctgcggctcctcggacctttacctggtcacgaggcacgccgatgtcttcccgtgcgccggcgaggtgatagcaggggcagcttgctctcgccccggcccatttcctacttgaaaggctcctcggggggtccgctgttgtgccccgcgggacacgccgtgggcatatttagggcgcggtgtgcacccgtggtgtggctaaggcggtggacttcatccctgtggagaacctagagacaaccatgagatccccggtgttcacggacaactcttctccaccagcagtgccccagagcttccaggtggctcacctgcatctcccactggcagcggcaagagcaccaaggtcccggctgcgtacgcagctcagggctacaaagtgctagtgctcaacccctctgttgctgcaacattgggctttggtgcttacatgtccaaggctcaggggtcgatcctaatgtcaggacgggggtgcgaacaattaccaccggcagccccatcacgtactccacctacggcaagttccttgccgacggcgggtgctcaggaggtgcttatgacataataatttgtgatgagtgccacccacggatgccacatccatcttgggcatcggcactgtccttgaccaagcagagaccgcgggggcgagactggttgtgctcgccactgctacccctccgggctccgtcaccgtgccccatcctaacatgaggaggttgctctgtccaccaccggagagatccctttttacggcaaggctattcccctcgaggtcatcaaggggggaaggcatctcatcttctgccactcaaagaaaaagtgtgacgagctcgccgcaaagctggtcgcatgggcatcaatgccgtggcctactaccgcggtcttgacgtgtctgtcatcccgaccagcggcgatgttgtcgtcgtggcgaccgatgctctcatgactggctataccggcgacttcgactctgtgatgactgcaacacgtgtgtcacccagacagtcgatttcagccttgaccctaccttcaccattgagacaaccacgctcccccaagacgctgtctcccggactcaacgtcggggcagaaccggcagggggaagccaggcatctacgatttgtggcaccgggggaacgcccctccggcatgttcgactcgtccgtcatctgtgagtgctatgacgcgggctgtgcttggtatgagctcacgcccgccgagactacagttaggctacgagcgtaatgaacaccccggggctccccgtgtgccaggaccatcttgaattttgggagggcgtctttacgggcctcacccatatagatgcccactttctatcccagacaaagcagagtggagagaacttcccttacctggtagcgtacaagccaccgtgtgcgctagggctcaagcccctcccccatcgtgggaccagatgtggaagtgtttgatccgcctcaaacccaccctccatgggccaacacccctgctatacagactgggcgctgttcaaatgaagtcaccctgacgcacccagtcaccaaatacatcatgacatgcatgtcggctga

SEQ ID NO: 127 - DNA, 4869 bp, Hepatitis C virus; identical to SEQ ID NO: 96

SEQ ID NO: 128 - DNA, 4869 bp, Hepatitis C virus; identical to SEQ ID NO: 96

SEQ ID NO: 129 - DNA, 4869 bp, Hepatitis C virus; identical to SEQ ID NO: 96

SEQ ID NO: 130 - DNA, 4869 bp, Hepatitis C virus; identical to SEQ ID NO: 96

SEQ ID NO: 131 - DNA, 4905 bp, Hepatitis C virus
tcgcccacaggacgtcaagttcccgggtggcggtcagatcgttggtggagtttacttgttgccgcgcaggggccctagattgggtgtgcgcgcgacgaggaagacttccgagcggtcgcaacctcgaggtagacgtcagcctatccccaaggcgcgtcggcccgagggcaggtcctgggctcagcccgggtacccttggcccctctatggcaatgagggttgcgggtgggcgggatggctcctgtctccccgtggctctcggcctagctggggccccacagacccccggcgtaggtcgcgcaatttgggtaaggtcatcgatacccttacgtgcggcttcgccgacctcatggggtacataccgctcgtcggcgcccctctcggaggcgctgccagggccctggcgcatggcgtcagggttctggaagacggcgtgaactatgcaacagggaatcttcctggttgctctttctctatcttccttctggctctgctctcttgcctgaccgtgcccgcttcagcctaccaagtgcgcaactcttcggggctttaccatgtcaccaatgattgccctaactcgagtattgtgtacgaggcggccgatgccattctgcacactccggggtgtgtcccttgtgtttacgagggtaacacctcgaggtgttgggtggcggtgacccccacagtggccaccagggacggcaaactccccacgacgcagcttcgacgccacatcgatctgcttgtcgggagtgccaccctctgctcggccctctacgtgggggatctgtgcgggtctgtctttcttgtcggccaactgttcaccttctctcccaggcgccaccggacgatgcagaactgcaattgttctatctaccccggccatataacgggccaccgcatggcatgggatatgatgatgaactggtcccctacggtggcattggcggtagctcagctgctccggatcccacaagccatcatggacatgatcgctggtgctcactggggagtcctggcgggcatagcgtatttctccatggtggggaactgggcgaaggtcctggtagtgctgctgctatttgccggcgtcgacgcggagacccacgtcaccgggggagctgccggccgctccacggctgggattgctggtctcttcagcccaggcgccagacagaacatccaactgatcaataccaacggcagttggcacatcaatagcacggccctgaactgcaacgacagcctcaacaccggctggatagcagggctcttctattccaacaaattcaactcttcgggctgtcccgagaggttggccagctgccgacgccttgccgattttgcccagggctggggccccatcagttacgccaacggaagcggccccgacgaacgcccctactgctggcactaccccccaagaccttgtggtattgtgcccgctaagagcgtgtgtggcccggtgtattgcttcactcccagccccgtggtggtgggaacgaccgacaggtcgggcgcgcctacctacaactggggtgaaaatgacacggacgtcttcgtcctcaacaacaccaggccgccgctgggcaattggttcggttgtacctggatgaactcaagtggattcaccaaagtgtgcggagcgcccccttgtgtcatcggaggggtgggcaacaacaccttgcgctgccccactgattgcttccgcaaacatccggaagccacatactctcggtgcggctccggtccttggatcacacccaggtgcatggtcgactacccatataggctttggcattatccttgtaccatcaactacaccttattcaaagtcaggatgtacgtgggaggggtcgagcacaggctggaagctgcctgcaactggacgcggggcgaacgctgtgatctggaagacagggacaggtccgagctcagtccgttactgctgtccaccacgcagtggcaggtccttccgtgttcttttacgaccctgccagccttgtccaccggcctcatccacctccaccagaacattgtggacgtgcagtacttgtacggggtagggtcaagcatcgcgtcctgggccattaagtgggagtacgtcgttctcctgttccttctgcttgcagacgcgcgcgtctgctcctgcttgtggatgatgttactcatatcccaagcggaggcggctttggagaacctcgtagtactcaatgcagcatccctggccgggacgcacggtcttgtgtccttcctcgtgttcttctgctttgcgtggtatctgaagggtaggtgggcgcccggagcggtctacgccctctacgggatgtggcctctcctcctgctcctgctggcgctgcctcagcgggcatacgcactggacacggaggtggccgcgtcgtgtggcggcgttgttcttgtcgggttgatggcgctgactctgtcaccacattacaagcgcctcatctgctggtgcgtgtggtggcttcagtattttctaaccagagtggaagcgcacctgcacgtgtgggttccccccctcaacgtccggggggggcgcgatgccatcatcttactcatgtgtgttatacacccggctctgatatttgacatcaccaaactgctgctggccgtcttcggacccctttggattcttcaagccagtttgctgaaagtcccctacttcgtgcgcgttcaaggccttctccgaatctgcgcgctagcgcggaagttagccggaggtcattacgtgcagatggccatcatcaagttaggggcgcttactggcacctatgtctataaccatctcactcctctccgagactgggcgcacaacggcctgcaagacctggccgtggctgtagaaccagtcatcttctcccgaatggagaccaaactcatcacgtggggggcagacaccgccgcgtgcggcgacatcatcaacggcttgcccgtctccgcccgcaggggccgggagatattgcttggaccagccgacggaatggcctctaaagggtggaggttgctggcgcccatcacagcgtacgcccagcagacgagaggcctcctagggtgcataatcaccagcctgactggccgggataaaaaccaagtggagggtgaggtccagatcgtgtcaactgctacccaaaccttcctggcaacgtgcatcaatggggtatgctggactgtctaccacggggccggaacgaggaccatcgcatcacccaggggtcctgttatccagatgtacaccaatgtggaccaggaccttgtgggctggcctgctcctcaaggttcccgctcattgacaccctgcacctgcggctcctcggacctttacctggtcacgaggcacgccgatgtcattcccgtgcgccggcgaggtgatagcaggggcagcttgctctcgccccggcccatttcctacttgaaaggctcctcggggggtccgctgttgtgccccgcgggacacgccgtgggcatatttagggccgcggtgtgcacccgtggtgtggctaaggcggtggacttcatccctgtggagaacctagagacaaccatgagatccccggtgttcacggacaactcttctccaccagcagtgccccagagcttccaggtggctcacctgcatgctcccactggcagcggcaagagcaccaaggtcccggctgcgtacgcagctcagggctacaaagtgctagtgctcaacccctctgttgctgcaacattgggctttggtgcttacatgtccaaggctcatggggtcgatcctaatgtcaggacgggggtgcgaacaattaccaccggcagccccatcacgtactccacctacggcaagttccttgccgacggcgggtgctcaggaggtgcttatgacataataatttgtgatgagtgccactccacggatgccacatccatcttgggcatcggcactgtccttgaccaagcagagaccgcgggggcgagactggttgtgctcgccactgctacccctccgggctccgtcaccgtgccccatcctaacatcgaggaggttgctctgtccaccaccggagagatccctttttacggcaaggctattcccctcgaggtcatcaaggggggaaggcatctcatcttctgccactcaaagaaaaagtgtgacgagctcgccgcaaagctggtcgcattgggcatcaatgccgtggcctactaccgcggtcttgacgtgtctgtcatcccgaccagcggcgatgttgtcgtcgtggcgaccgatgctctcatgactggctataccggcgacttcgactctgtgatagactgcaacacgtgtgtcacccagacagtcgatttcagccttgaccctaccttcaccattgagacaaccacgctcccccaagacgctgtctcccggactcaacgtcggggcagaaccggcagggggaagccaggcatctacagatttgtggcaccgggggaacgcccctccggcatgttcgactcgtccgtcatctgtgagtgctatgacgcgggctgtgcttggtatgagctcacgcccgccgagactacagttaggctacgagcgtacatgaacaccccggggctccccgtgtgccaggaccatcttgaattttgggagggcgtctttacgggcctcacccatatagatgcccactttctatcccagacaaagcagagtggagagaacttcccttacctggtagcgtaccaagccaccgtgtgcgctagggctcaagcccctcccccatcgtgggaccagatgtggaagtgtttgatccgcctcaaacccaccctccatgggccaacacccctgctatacagactgggcgctgttcagaatgaagtcaccctgacgcacccagtcaccaaatacatcatgacatgcatgtcggctga

SEQ ID NO: 132 - DNA, 4905 bp, Hepatitis C virus; identical to SEQ ID NO: 131

SEQ ID NO: 133 - DNA, 4869 bp, Hepatitis C virus; identical to SEQ ID NO: 96

SEQ ID NO: 134 - DNA, 4869 bp, Hepatitis C virus; identical to SEQ ID NO: 96

SEQ ID NO: 135 - DNA, 4869 bp, Hepatitis C virus; identical to SEQ ID NO: 96

SEQ ID NO: 136 - DNA, 4869 bp, Hepatitis C virus; identical to SEQ ID NO: 96

SEQ ID NO: 137 - DNA, 4869 bp, Hepatitis C virus; identical to SEQ ID NO: 96

SEQ ID NO: 138 - DNA, 4869 bp, Hepatitis C virus
tcgcccacaggacgtcaagttcccgggtggcggtcagatcgttggtggagtttacttgttgccgcgcaggggccctagattgggtgtgcgcgcgacgaggaagacttccgagcggtcgcaacctcgagtagacgtcagcctatccccaaggcgcgtcggcccgagggcaggtcctgggctcagcccgggtacccttggcccctctatggcaatgagggttgcgggtgggcgggatggctcctgtctccccgtggtctcggcctagctggggccccacagacccccggcgtaggtcgcgcaatttgggtaaggtcatcgatacccttacgtgcggcttcgccgacctcatggggtacataccgctcgtcggcgcccctctcggaggcgctgccaggccctggcgcatggcgtcagggttctggaagacggcgtgaactatgcaacagggaatcttcctggttgctctttctctatcttccttctggctctgctctcttgcctgaccgtgcccgcttcagcctacaagtgcgcaactcttcggggctttaccatgtcaccaatgattgccctaactcgagtattgtgtacgaggcggccgatgccattctgcacactccggggtgtgtcccttgtgtttacgagggtaacacctcgaggtgttggtggcggtgacccccacagtggccaccagggacggcaaactccccacgacgcagcttcgacgccacatcgatctgcttgtcgggagtgccaccctctgctcggccctctacgtgggggatctgtgcggtctgtctttcttgtcggccaactgttcaccttctctcccaggcgccaccggacgatgcagaactgcaattgttctatctaccccggccatataacgggccaccgcatggcatgggatatgatgatgaactggtcccctacgtggcattggcggtagctcagctgctccggatcccacaagccatcatggacatgatcgctggtgctcactggggagtcctggcgggcatagcgtatttctccatggtggggaactgggcgaaggtcctgtagtgctgctgctatttgccggcgtcgacgcggagacccacgtcaccgggggagctgccggccgctccacggctgggattgctggtctcttcagcccaggcgccagacagaacatccaactgatcaataccaacggcagtggcacatcaatagcacggccctgaactgcaacgacagcctcaacaccggctggatagcagggctcttctattccaacaaattcaactcttcgggctgtcccgagaggttggccagctgccgacgcctgccgattttgcccagggctggggccccatcagttacgccaacggaagcggccccgacgaacgcccctactgctggcactaccccccaagaccttgtggtattgtgcccgctaagagcgtgtgtggcccggtgtattgcttcctcccagccccgtggtggtgggaacgaccgacaggtcgggcgcgcctacctacaactggggtgaaaatgacacggacgtcttcgtcctcaacaacaccaggccgccgctgggcaattggttcggttgacctggatgaactcaagtggattcaccaaagtgtgcggagcgcccccttgtgtcatcggaggggtgggcaacaacaccttgcgctgccccactgattgcttccgcaaacatccggaagccacatattctcggtgcggctccgtccttggatcacacccaggtgcatggtcgactacccatataggctttggcattatccttgtaccatcaactacaccttattcaaagtcaggatgtacgtgggaggggtcgagcacaggctggaagcgcctgcaactggacgcggggcgaacgctgtgatctggaagacagggacaggtccgagctcagtccgttactgctgtccaccacgcagtggcaggtccttccgtgttcttttacgaccctgccagccttgtccaccggcctctccacctccaccagaacattgtggacgtgcagtacttgtacggggtagggtcaagcatcgcgtcctgggccattaagtgggagtacgtcgttctcctgttccttctgcttgcagacgcgcgcgtctgtcctgcttgtggatgatgttactcatatcccaagcggaggcggctttggagaacctcgtagtactcaatgcagcatccctggccgggacgcacggtcttgtgtccttcctcgtgttcttctgctttgcgtggtatctgaaggtaggtgggcgcccggagcggtctacgccctctacgggatgtggcctctcctcctgctcctgctggcgctgcctcagcgggcatacgcactggacacggaggtggccgcgtcgtgtggcggcgttgtcttgtcgggttgatggcgctgactctgtcaccacattacaagcgcctcatctgctggtgcgtgtggtggcttcagtattttctaaccagagtggaagcgcacctgcacgtgtgggttccccccctcaacgtccgggggggggcgatgccatcatcttactcatgtgtgttatacacccggctctgatatttgacatcaccaaactgctgctggccgtcttcggacccctttggattcttcaagccagtttgctgaaagtcccctacttgtgcgcgttcaaggccttctccgaatctgcgcgctagcgcggaagttagccggaggtcattacgtgcagatggccatcatcaagttaggggcgcttactggcacctatgtctataaccatctcactcctctccgagactggcgcacaacggcctgcaagacctggccgtggctgtagaaccagtcatcttctcccgaatggagaccaaactcatcacgtggggggcagacaccgccgcgtgcggcgacatcatcaacggcttgcccgttccgcccgcaggggccgggagatattgcttggaccagccgacggaatggcctctaaagggtggaggttgctggcgcccatcacagcgtacgcccagcagacgagaggcctcctagggtgcataatcaccagcctgactggcgggataaaaaccaagtggagggtgaggtccagatcgtgtcaactgctacccaaaccttcctggcaacgtgcatcaatggggtatgctggactgtctaccacggggccggaacgaggaccatcgcatccccaggggtcctgttatccagatgtacaccaatgtggaccaggaccttgtgggctggcctgctcctcaaggttcccgctcattgacaccctgcacctgcggctcctcggacctttacctggtcacgaggcacgccgatgtcttcccgtgcgccggcgaggtgatagcaggggcagcttgctctcgccccggcccatttcctacttgaaaggctcctcggggggtccgctgttgtgccccgcgggacacgccgtgggcatatttagggcgcggtgtgcacccgtggtgtggctaaggcggtggacttcatccctgtggagaacctagagacaaccatgagatccccggtgttcacggacaactcttctccaccagcagtgccccagagcttccaggtggctcacctgcatctcccactggcagcggcaagagcaccaaggtcccggctgcgtacgcagctcagggctacaaagtgctagtgctcaacccctctgttgctgcaacattgggctttggtgcttacatgtccaaggctcaggggtcgatcctaatgtcaggacgggggtgcgaacaattaccaccggcagccccatcacgtactccacctacggcaagttccttgccgacggcgggtgctcaggaggtgcttatgacataataatttgtgatgagtgccacccacggatgccacatccatcttgggcatcggcactgtccttgaccaagcagagaccgcgggggcgagactggttgtgctcgccactgctacccctccgggctccgtcaccgtgccccatcctaacatgaggaggttgctctgtccaccaccggagagatccctttttacggcaaggctattcccctcgaggtcatcaaggggggaaggcatctcatcttctgccactcaaagaaaaagtgtgacgagctcgccgcaaagctggtcgcatgggcatcaatgccgtggcctactaccgcggtcttgacgtgtctgtcatcccgaccagcggcgatgttgtcgtcgtggcgaccgatgctctcatgactggctataccggcgacttcgactctgtgatgactgcaacacgtgtgtcacccagacagtcgatttcagccttgaccctaccttcaccattgagacaaccacgctcccccaagacgctgtctcccggactcaacgtcggggcagaaccggcagggggaagccaggcatctacgatttgtggcaccgggggaacgcccctccggcatgttcgactcgtccgtcatctgtgagtgctatgacgcgggctgtgcttggtatgagctcacgcccgccgagactacagttaggctacgagcgtaatgaacaccccggggctccccgtgtgccaggaccatcttgaattttgggagggcgtctttacgggcctcacccatatagatgcccactttctatcccagacaaagcagagtggagagaacttcccttacctggtagcgtacaagccaccgtgtgcgctagggctcaagcccctcccccatcgtgggaccagatgtggaagtgtttgatccgcctcaaacccaccctccatgggccaacacccctgctatacagactgggcgctgttcaaatgaagtcaccctgacgcacccagtcaccaaatacatcatgacatgcatgtcggctga

SEQ ID NO: 139 - DNA, 4869 bp, Hepatitis C virus
tcgcccacaggacgtcaagttcccgggtggcggtcagatcgttggtggagtttacttgttgccgcgcaggggccctagattgggtgtgcgcgcgacgaggaagacttccgagcggtcgcaacctcgagtagacgtcagcctatccccaaggcgcgtcggcccgagggcaggtcctgggctcagcccgggtacccttggcccctctatggcaatgagggttgcgggtgggcgggatggctcctgtctccccgtggtctcggcctagctggggccccacagacccccggcgtaggtcgcgcaatttgggtaaggtcatcgatacccttacgtgcggcttcgccgacctcatggggtacataccgctcgtcggcgcccctctcggaggcgctgccaggccctggcgcatggcgtcagggttctggaagacggcgtgaactatgcaacagggaatcttcctggttgctctttctctatcttccttctggctctgctctcttgcctgaccgtgcccgcttcagcctacaagtgcgcaactcttcggggctttaccatgtcaccaatgattgccctaactcgagtattgtgtacgaggcggccgatgccattctgcacactccggggtgtgtcccttgtgtttacgagggtaacacctcgaggtgttggtggcggtgacccccacagtggccaccagggacggcaaactccccacgacgcagcttcgacgccacatcgatctgcttgtcgggagtgccaccctctgctcggccctctacgtgggggatctgtgcggtctgtctttcttgtcggccaactgttcaccttctctcccaggcgccaccggacgatgcagaactgcaattgttctatctaccccggccatataacgggccaccgcatggcatgggatatgatgatgaactggtcccctacgtggcattggcggtagctcagctgctccggatcccacaagccatcatggacatgatcgctggtgctcactggggagtcctggcgggcatagcgtatttctccatggtggggaactgggcgaaggtcctgtagtgctgctgctatttgccggcgtcgacgcggagacccacgtcaccgggggagctgccggccgctccacggctgggattgctggtctcttcagcccaggcgccagacagaacatccaactgatcaataccaacggcagtggcacatcaatagcacggccctgaactgcaacgacagcctcaacaccggctggatagcagggctcttctattccaacaaattcaactcttcgggctgtcccgagaggttggccagctgccgacgcctgccgattttgcccagggctggggccccatcagttacgccaacggaagcggccccgacgaacgcccctactgctggcactaccccccaagaccttgtggtattgtgcccgctaagagcgtgtgtggcccggtgtattgcttcctcccagccccgtggtggtgggaacgaccgacaggtcgggcgcgcctacctacaactggggtgaaaatgacacggacgtcttcgtcctcaacaacaccaggccgccgctgggcaattggttcggttgacctggatgaactcaagtggattcaccaaagtgtgcggagcgcccccttgtgtcatcggaggggtgggcaacaacaccttgcgctgccccactgattgcttccgcaaacatccggaagccacatactctcggtgcggctccgtccttggatcacacccaggtgcatggtcgactacccatataggctttggcattatccttgtaccatcaactacaccttattcaaagtcaggatgtacgtgggaggggtcgagcacaggctggaagcgcctgcaactggacgcggggcgaacgctgtgatctggaagacagggacaggtccgagctcagtccgttactgctgtccaccacgcagtggcaggtccttccgtgttcttttacgaccctgccagccttgtccaccggcctctccacctccaccagaacattgtggacgtgcagtacttgtacggggtagggtcaagcatcgcgtcctgggccattaagtgggagtacgtcgttctcctgttccttctgcttgcagacgcgcgcgtctgtcctgcttgtggatgatgttactcatatcccaagcggaggcggctttggagaacctcgtagtactcaatgcagcatccctggccgggacgcacggtcttgtgtccttcctcgtgttcttctgctttgcgtggtatctgaaggtaggtgggcgcccggagcggtctacgccctctacgggatgtggcctctcctcctgctcctgctggcgctgcctcagcgggcatacgcactggacacggaggtggccgcgtcgtgtggcggcgttgtcttgtcgggttgatggcgctgactctgtcaccacattacaagcgcctcatctgctggtgcgtgtggtggcttcagtattttctaaccggagtggaagcgcacctgcacgtgtgggttccccccctcaacgtccgggggggggcgatgccatcatcttactcatgtgtgttatacacccggctctgatatttgacatcaccaaactgctgctggccgtcttcggacccctttggattcttcaagccagtttgctgaaagtcccctacttgtgcgcgttcaaggccttctccgaatctgcgcgctagcgcggaagttagccggaggtcattacgtgcagatggccatcatcaagttaggggcgcttactggcacctatgtctataaccatctcactcctctccgagactggcgcacaacggcctgcaagacctggccgtggctgtagaaccagtcatcttctcccgaatggagaccaaactcatcacgtggggggcagacaccgccgcgtgcggcgacatcatcaacggcttgcccgttccgcccgcaggggccgggagatattgcttggaccagccgacggaatggcctctaaagggtggaggttgctggcgcccatcacagcgtacgcccagcagacgagaggcctcctagggtgcataatcaccagcctgactggcgggataaaaaccaagtggagggtgaggtccagatcgtgtcaactgctacccaaaccttcctggcaacgtgcatcaatggggtatgctggactgtctaccacggggccggaacgaggaccatcgcatccccaggggtcctgttatccagatgtacaccaatgtggaccaggaccttgtgggctggcctgctcctcaaggttcccgctcattgacaccctgcacctgcggctcctcggacctttacctggtcacgaggcacgccgatgtcttcccgtgcgccggcgaggtgatagcaggggcagcttgctctcgccccggcccatttcctacttgaaaggctcctcggggggtccgctgttgtgccccgcgggacacgccgtgggcatatttagggcgcggtgtgcacccgtggtgtggctaaggcggtggacttcatccctgtggagaacctagagacaaccatgagatccccggtgttcacggacaactcttctccaccagcagtgccccagagcttccaggtggctcacctgcatctcccactggcagcggcaagagcaccaaggtcccggctgcgtacgcagctcagggctacaaagtgctagtgctcaacccctctgttgctgcaacattgggctttggtgcttacatgtccaaggctcaggggtcgatcctaatgtcaggacgggggtgcgaacaattaccaccggcagccccatcacgtactccacctacggcaagttccttgccgacggcgggtgctcaggaggtgcttatgacataataatttgtgatgagtgccacccacggatgccacatccatcttgggcatcggcactgtccttgaccaagcagagaccgcgggggcgagactggttgtgctcgccactgctacccctccgggctccgtcaccgtgccccatcctaacatgaggaggttgctctgtccaccaccggagagatccctttttacggcaaggctattcccctcgaggtcatcaaggggggaaggcatctcatcttctgccactcaaagaaaaagtgtgacgagctcgccgcaaagctggtcgcatgggcatcaatgccgtggcctactaccgcggtcttgacgtgtctgtcatcccgaccagcggcgatgttgtcgtcgtggcgaccgatgctctcatgactggctataccggcgacttcgactctgtgatgactgcaacacgtgtgtcacccagacagtcgatttcagccttgaccctaccttcaccattgagacaaccacgctcccccaagacgctgtctcccggactcaacgtcggggcagaaccggcagggggaagccaggcgtctacgatttgtggcaccgggggaacgcccctccggcatgttcgactcgtccgtcatctgtgagtgctatgacgcgggctgtgcttggtatgagctcacgcccgccgagactacagttaggctacgagcgtaatgaacaccccggggctccccgtgtgccaggaccatcttgaattttgggagggcgtctttacgggcctcacccatatagatgcccactttctatcccagacaaagcagagtggagagaacttcccttacctggtagcgtacaagccaccgtgtgcgctagggctcaagcccctcccccatcgtgggaccagatgtggaagtgtttgatccgcctcaaacccaccctccatgggccaacacccctgctatacagactgggcgctgttcaaatgaagtcaccctgacgcacccagtcaccaaatacatcatgacatgcatgtcggctga

SEQ ID NO: 140 - DNA, 4869 bp, Hepatitis C virus
tcgcccacaggacgtcaagttcccgggtggcggtcagatcgttggtggagtttacttgttgccgcgcaggggccctagattgggtgtgcgcgcgacgaggaagacttccgagcggtcgcaacctcgagtagacgtcagcctatccccaaggcgcgtcggcccgagggcaggtcctgggctcagcccgggtacccttggcccctctatggcaatgagggttgcgggtgggcgggatggctcctgtctccccgtggtctcggcctagctggggccccacagacccccggcgtaggtcgcgcaatttgggtaaggtcatcgatacccttacgtgcggcttcgccgacctcatggggtacataccgctcgtcggcgcccctctcggaggcgctgccaggccctggcgcatggcgtcagggttctggaagacggcgtgaactatgcaacagggaatcttcctggttgctctttctctatcttccttctggctctgctctcttgcctgaccgtgcccgcttcagcctacaagtgcgcaactcttcggggctttaccatgtcaccaatgattgccctaactcgagtattgtgtacgaggcggccgatgccattctgcacactccggggtgtgtcccttgtgtttacgagggtaacacctcgaggtgttggtggcggtgacccccacagtggccaccagggacggcaaactccccacgacgcagcttcgacgccacatcgatctgcttgtcgggagtgccgccctctgctcggccctctacgtgggggatctgtgcggtctgtctttcttgtcggccaactgttcaccttctctcccaggcgccaccggacgatgcagaactgcaattgttctatctaccccggccatataacgggccaccgcatggcatgggatatgatgatgaactggtcccctacgtggcattggcggtagctcagctgctccggatcccacaagccatcatggacatgatcgctggtgctcactggggagtcctggcgggcatagcgtatttctccatggtggggaactgggcgaaggtcctgtagtgctgctgctatttgccggcgtcgacgcggagacccacgtcaccgggggagctgccggccgctccacggctgggattgctggtctcttcagcccaggcgccagacagaacatccaactgatcaataccaacggcagtggcacatcaatagcacggccctgaactgcaacgacagcctcaacaccggctggatagcagggctcttctattccaacaaattcaactcttcgggctgtcccgagaggttggccagctgccgacgcctgccgattttgcccagggctggggccccatcagttacgccaacggaagcggccccgacgaacgcccctactgctggcactaccccccaagaccttgtggtattgtgcccgctaagagcgtgtgtggcccggtgtattgcttcctcccagccccgtggtggtgggaacgaccgacaggtcgggcgcgcctacctacaactggggtgaaaatgacacggacgtcttcgtcctcaacaacaccaggccgccgctgggcaattggttcggttgacctggatgaactcaagtggattcaccaaagtgtgcggagcgcccccttgtgtcatcggaggggtgggcaacaacaccttgcgctgccccactgattgcttccgcaaacatccggaagccacatactctcggtgcggctccgtccttggatcacacccaggtgcatggtcgactacccatataggctttggcattatccttgtaccatcaactacaccttattcaaagtcaggatgtacgtgggaggggtcgagcacaggctggaagcgcctgcaactggacgcggggcgaacgctgtgatctggaagacagggacaggtccgagctcagtccgttactgctgtccaccacgcagtggcaggtccttccgtgttcttttacgaccctgccagccttgtccaccggcctctccacctccaccagaacattgtggacgtgcagtacttgtacggggtagggtcaagcatcgcgtcctgggccattaagtgggagtacgtcgttctcctgttccttctgcttgcagacgcgcgcgtctgtcctgcttgtggatgatgttactcatatcccaagcggaggcggctttggagaacctcgtagtactcaatgcagcatccctggccgggacgcacggtcttgtgtccttcctcgtgttcttctgctttgcgtggtatctgaaggtaggtgggcgcccggagcggtctacgccctctacgggatgtggcctctcctcctgctcctgctggcgctgcctcagcgggcatacgcactggacacggaggtggccgcgtcgtgtggcggcgttgtcttgtcgggttgatggcgctgactctgtcaccacattacaagcgcctcatctgctggtgcgtgtggtggcttcagtattttctaaccagagtggaagcgcacctgcacgtgtgggttccccccctcaacgtccgggggggggcgatgccatcatcttactcatgtgtgttatacacccggctctgatatttgacatcaccaaactgctgctggccgtcttcggacccctttggattcttcaagccagtttgctgaaagtcccctacttgtgcgcgttcaaggccttctccgaatctgcgcgctagcgcggaagttagccggaggtcattacgtgcagatggccatcatcaagttaggggcgcttactggcacctatgtctataaccatctcactcctctccgagactggcgcacaacggcctgcaagacctggccgtggctgtagaaccagtcatcttctcccgaatggagaccaaactcatcacgtggggggcagacaccgccgcgtgcggcgacatcatcaacggcttgcccgttccgcccgcaggggccgggagatattgcttggaccagccgacggaatggcctctaaagggtggaggttgctggcgcccatcacagcgtacgcccagcagacgagaggcctcctagggtgcataatcaccagcctgactggcgggataaaaaccaagtggagggtgaggtccagatcgtgtcaactgctacccaaaccttcctggcaacgtgcatcaatggggtatgctggactgtctaccacggggccggaacgaggaccatcgcatccccaggggtcctgttatccagatgtacaccaatgtggaccaggaccttgtgggctggcctgctcctcaaggttcccgctcattgacaccctgcacctgcggctcctcggacctttacctggtcacgaggcacgccgatgtcttcccgtgcgccggcgaggtgatagcaggggcagcttgctctcgccccggcccatttcctacttgaaaggctcctcggggggtccgctgttgtgccccgcgggacacgccgtgggcatatttagggcgcggtgtgcacccgtggtgtggctaaggcggtggacttcatccctgtggagaacctagagacaaccatgagatccccggtgttcacggacaactcttctccaccagcagtgccccagagcttccaggtggctcacctgcatctcccactggcagcggcaagagcaccaaggtcccggctgcgtacgcagctcagggctacaaagtgctagtgctcaacccctctgttgctgcaacattgggctttggtgcttacatgtccaaggctcaggggtcgatcctaatgtcaggacgggggtgcgaacaattaccaccggcagccccatcacgtactccacctacggcaagttccttgccgacggcgggtgctcaggaggtgcttatgacataataatttgtgatgagtgccacccacggatgccacatccatcttgggcatcggcactgtccttgaccaagcagagaccgcgggggcgagactggttgtgctcgccactgctacccctccgggctccgtcaccgtgccccatcctaacatgaggaggttgctctgtccaccaccggagagatccctttttacggcaaggctattcccctcgaggtcatcaaggggggaaggcatctcatcttctgccactcaaagaaaaagtgtgacgagctcgccgcaaagctggtcgcatgggcatcaatgccgtggcctactaccgcggtcttgacgtgtctgtcatcccgaccagcggcgatgttgtcgtcgtggcgaccgatgctctcatgactggctataccggcgacttcgactctgtgatgactgcaacacgtgtgtcacccagacagtcgatttcagccttgaccctaccttcaccattgagacaaccacgctcccccaagacgctgtctcccggactcaacgtcggggcagaaccggcagggggaagccaggcatctacgatttgtggcaccgggggaacgcccctccggcatgttcgactcgtccgtcatctgtgagtgctatgacgcgggctgtgcttggtatgagctcacgcccgccgagactacagttaggctacgagcgtaatgaacaccccggggctccccgtgtgccaggaccatcttgaattttgggagggcgtctttacgggcctcacccatatagatgcccactttctatcccagacaaagcagagtggagagaacttcccttacctggtagcgtacaagccaccgtgtgcgctagggctcaagcccctcccccatcgtgggaccagatgtggaagtgtttgatccgcctcaaacccaccctccatgggccaacacccctgctatacagactgggcgctgttcaaatgaagtcaccctgacgcacccagtcaccaaatacatcatgacatgcatgtcggctga

SEQ ID NO: 141 - DNA, 4869 bp, Hepatitis C virus; identical to SEQ ID NO: 96

SEQ ID NO: 142 - DNA, 4869 bp, Hepatitis C virus; identical to SEQ ID NO: 96

SEQ ID NO: 143 - DNA, 4869 bp, Hepatitis C virus; identical to SEQ ID NO: 96

SEQ ID NO: 144 - DNA, 4869 bp, Hepatitis C virus; identical to SEQ ID NO: 96

SEQ ID NO: 145 - DNA, 4869 bp, Hepatitis C virus; identical to SEQ ID NO: 96

SEQ ID NO: 146 - DNA, 4869 bp, Hepatitis C virus; identical to SEQ ID NO: 96

SEQ ID NO: 147 - DNA, 4869 bp, Hepatitis C virus; identical to SEQ ID NO: 96

SEQ ID NO: 148 - DNA, 4869 bp, Hepatitis C virus
tcgcccacaggacgtcaagttcccgggtggcggtcagatcgttggtggagtttacttgttgccgcgcaggggccctagattgggtgtgcgcgcgacgaggaagacttccgagcggtcgcaacctcgagtagacgtcagcctatccccaaggcgcgtcggcccgagggcaggtcctgggctcagcccgggtacccttggcccctctatggcaatgagggttgcgggtgggcgggatggctcctgtctccccgtggtctcggcctagctggggccccacagacccccggcgtaggtcgcgcaatttgggtaaggtcatcgatacccttacgtgcggcttcgccgacctcatggggtacataccgctcgtcggcgcccctctcggaggcgctgccaggccctggcgcatggcgtcagggttctggaagacggcgtgaactatgcaacagggaatcttcctggttgctctttctctatcttccttctggctctgctctcttgcctgaccgtgcccgcttcagcctacaagtgcgcaactcttcggggctttaccatgtcaccaatgattgccctaactcgagtattgtgtacgaggcggccgatgccattctgcacactccggggtgtgtcccttgtgtttacgagggtaacacctcgaggtgttggtggcggtgacccccacagtggccaccagggacggcaaactccccacgacgcagcttcgacgccacatcgatctgcttgtcgggagtgccaccctctgctcggccctctacgtgggggatctgtgcggtctgtctttcttgtcggccaactgttcaccttctctcccaggcgccaccggacgatgcagaactgcaattgttctatctaccccggccatataacgggccaccgcatggcatgggatatgatgatgaactggtcccctacgtggcattggcggtagctcagctgctccggatcccacaagccatcatggacatgatcgctggtgctcactggggagtcctggcgggcatagcgtatttctccatggtggggaactgggcgaaggtcctgtagtgctgctgctatttgccggcgtcgacgcggagacccacgtcaccgggggagctgccggccgctccacggctgggattgctggtctcttcagcccaggcgccagacagaacatccaactgatcaataccaacggcagtggcacatcaatagcacggccctgaactgcaacgacagcctcaacaccggctggatagcagggctcttctattccaacaaattcaactcttcgggctgtcccgagaggttggccagctgccgacgcctgccgattttgcccagggctggggccccatcagttacgccaacggaagcggccccgacgaacgcccctactgctggcactaccccccaagaccttgtggtattgtgcccgctaagagcgtgtgtggcccggtgtattgcttcctcccagccccgtggtggtgggaacgaccgacaggtcgggcgcgcctacctacaactggggtgaaaatgacacggacgtcttcgtcctcaacaacaccaggccgccgctgggcaattggttcggttgacctggatgaactcaagtggattcaccaaagtgtgcggagcgcccccttgtgtcatcggaggggtgggcaacaacaccttgcgctgccccactgattgcttccgcaaacatccggaagccacatactctcggtgcggctccgtccttggatcacacccaggtgcatggtcgactacccatataggctttggcattatccttgtaccatcaactacaccttattcaaagtcaggatgtacgtgggaggggtcgagcacaggctggaagcgcctgcaactggacgcggggcgaacgctgtgatctggaagacagggacaggtccgagctcagtccgttactgctgtccaccacgcagtggcaggtccttccgtgttcttttacgaccctgccagccttgtctaccggcctctccacctccaccagaacattgtggacgtgcagtacttgtacggggtagggtcaagcatcgcgtcctgggccattaagtgggagtacgtcgttctcctgttccttctgcttgcagacgcgcgcgtctgtcctgcttgtggatgatgttactcatatcccaagcggaggcggctttggagaacctcgtagtactcaatgcagcatccctggccgggacgcacggtcttgtgtccttcctcgtgttcttctgctttgcgtggtatctgaaggtaggtgggcgcccggagcggtctacgccctctacgggatgtggcctctcctcctgctcctgctggcgctgcctcagcgggcatacgcactggacacggaggtggccgcgtcgtgtggcggcgttgtcttgtcgggttgatggcgctgactctgtcaccacattacaagcgcctcatctgctggtgcgtgtggtggcttcagtattttctaaccagagtggaagcgcacctgcacgtgtgggttccccccctcaacgtccgggggggggcgatgccatcatcttactcatgtgtgttatacacccggctctgatatttgacatcaccaaactgctgctggccgtcttcggacccctttggattcttcaagccagtttgctgaaagtcccctacttgtgcgcgttcaaggccttctccgaatctgcgcgctagcgcggaagttagccggaggtcattacgtgcagatggccatcatcaagttaggggcgcttactggcacctatgtctataaccatctcactcctctccgagactggcgcacaacggcctgcaagacctggccgtggctgtagaaccagtcatcttctcccgaatggagaccaaactcatcacgtggggggcagacaccgccgcgtgcggcgacatcatcaacggcttgcccgttccgcccgcaggggccgggagatattgcttggaccagccgacggaatggcctctaaagggtggaggttgctggcgcccatcacagcgtacgcccagcagacgagaggcctcctagggtgcataatcaccagcctgactggcgggataaaaaccaagtggagggtgaggtccagatcgtgtcaactgctacccaaaccttcctggcaacgtgcatcaatggggtatgctggactgtctaccacggggccggaacgaggaccatcgcatccccaggggtcctgttatccagatgtacaccaatgtggaccaggaccttgtgggctggcctgctcctcaaggttcccgctcattgacaccctgcacctgcggctcctcggacctttacctggtcacgaggcacgccgatgtcttcccgtgcgccggcgaggtgatagcaggggcagcttgctctcgccccggcccatttcctacttgaaaggctcctcggggggtccgctgttgtgccccgcgggacacgccgtgggcatatttagggcgcggtgtgcacccgtggtgtggctaaggcggtggacttcatccctgtggagaacctagagacaaccatgagatccccggtgttcacggacaactcttctccaccagcagtgccccagagcttccaggtggctcacctgcatctcccactggcagcggcaagagcaccaaggtcccggctgcgtacgcagctcagggctacaaagtgctagtgctcaacccctctgttgctgcaacattgggctttggtgcttacatgtccaaggctcaggggtcgatcctaatgtcaggacgggggtgcgaacaattaccaccggcagccccatcacgtactccacctacggcaagttccttgccgacggcgggtgctcaggaggtgcttatgacataataatttgtgatgagtgccacccacggatgccacatccatcttgggcatcggcactgtccttgaccaagcagagaccgcgggggcgagactggttgtgctcgccactgctacccctccgggctccgtcaccgtgccccatcctaacatgaggaggttgctctgtccaccaccggagagatccctttttacggcaaggctattcccctcgaggtcatcaaggggggaaggcatctcatcttctgccactcaaagaaaaagtgtgacgagctcgccgcaaagctggtcgcatgggcatcaatgccgtggcctactaccgcggtcttgacgtgtctgtcatcccgaccagcggcgatgttgtcgtcgtggcgaccgatgctctcatgactggctataccggcgacttcgactctgtgatgactgcaacacgtgtgtcacccagacagtcgatttcagccttgaccctaccttcaccattgagacaaccacgctcccccaagacgctgtctcccggactcaacgtcggggcagaaccggcagggggaagccaggcatctacgatttgtggcaccgggggaacgcccctccggcatgttcgactcgtccgtcatctgtgagtgctatgacgcgggctgtgcttggtatgagctcacgcccgccgagactacagttaggctacgagcgtaatgaacaccccggggctccccgtgtgccaggaccatcttgaattttgggagggcgtctttacgggcctcacccatatagatgcccactttctatcccagacaaagcagagtggagagaacttcccttacctggtagcgtacaagccaccgtgtgcgctagggctcaagcccctcccccatcgtgggaccagatgtggaagtgtttgatccgcctcaaacccaccctccatgggccaacacccctgctatacagactgggcgctgttcaaatgaagtcaccctgacgcacccagtcaccaaatacatcatgacatgcatgtcggctga

SEQ ID NO: 149 - DNA, 4869 bp, Hepatitis C virus; identical to SEQ ID NO: 96

SEQ ID NO: 150 - DNA, 4869 bp, Hepatitis C virus
tcgcccacaggacgtcaagttcccgggtggcggtcagatcgttggtggagtttacttgttgccgcgcaggggccctagattgggtgtgcgcgcgacgaggaagacttccgagcggtcgcaacctcgagtagacgtcagcctatccccaaggcgcgtcggcccgagggcaggtcctgggctcagcccgggtacccttggcccctctatggcaatgagggttgcgggtgggcgggatggctcctgtctccccgtggtctcggcctagctggggccccacagacccccggcgtaggtcgcgcaatttgggtaaggtcatcgatacccttacgtgcggcttcgccgacctcatggggtacataccgctcgtcggcgcccctctcggaggcgctgccaggccctggcgcatggcgtcagggttctggaagacggcgtgaactatgcaacagggaatcttcctggttgctcttcctctatcttccttctggctctgctctcttgcctgaccgtgcccgcttcagcctacaagtgcgcaactcttcggggctttaccatgtcaccaatgattgccctaactcgagtattgtgtacgaggcggccgatgccattctgcacactccggggtgtgtcccttgtgtttacgagggtaacacctcgaggtgttggtggcggtgacccccacagtggccaccagggacggcaaactccccacgacgcagcttcgacgccacatcgatctgcttgtcgggagtgccaccctctgctcggccctctacgtgggggatctgtgcggtctgtctttcttgtcggccaactgttcaccttctctcccaggcgccaccggacgatgcagaactgcaattgttctatctaccccggccatataacgggccaccgcatggcatgggatatgatgatgaactggtcccctacgtggcattggcggtagctcagctgctccggatcccacaagccatcatggacatgatcgctggtgctcactggggagtcctggcgggcatagcgtatttctccatggtggggaactgggcgaaggtcctgtagtgctgctgctatttgccggcgtcgacgcggagacccacgtcaccgggggagctgccggccgctccacggctgggattgctggtctcttcagcccaggcgccagacagaacatccaactgatcaataccaacggcagtggcacatcaatagcacggccctgaactgcaacgacagcctcaacaccggctggatagcagggctcttctattccaacaaattcaactcttcgggctgtcccgagaggttggccagctgccgacgcctgccgattttgcccagggctggggccccatcagttacgccaacggaagcggccccgacgaacgcccctactgctggcactaccccccaagaccttgtggtattgtgcccgctaagagcgtgtgtggcccggtgtattgcttcctcccagccccgtggtggtgggaacgaccgacaggtcgggcgcgcctacctacaactggggtgaaaatgacacggacgtcttcgtcctcaacaacaccaggccgccgctgggcaattggttcggttgacctggatgaactcaagtggattcaccaaagtgtgcggagcgcccccttgtgtcatcggaggggtgggcaacaacaccttgcgctgccccactgattgcttccgcaaacatccggaagccacatactctcggtgcggctccgtccttggatcacacccaggtgcatggtcgactacccatataggctttggcattatccttgtaccatcaactacaccttattcaaagtcaggatgtacgtgggaggggtcgagcacaggctggaagcgcctgcaactggacgcggggcgaacgctgtgatctggaagacagggacaggtccgagctcagtccgttactgctgtccaccacgcagtggcaggtccttccgtgttcttttacgaccctgccagccttgtccaccggcctctccacctccaccagaacattgtggacgtgcagtacttgtacggggtagggtcaagcatcgcgtcctgggccattaagtgggagtacgtcgttctcctgttccttctgcttgcagacgcgcgcgtctgtcctgcttgtggatgatgttactcatatcccaagcggaggcggctttggagaacctcgtagtactcaatgcagcatccctggccgggacgcacggtcttgtgtccttcctcgtgttcttctgctttgcgtggtatctgaaggtaggtgggcgcccggagcggtctacgccctctacgggatgtggcctctcctcctgctcctgctggcgctgcctcagcgggcatacgcactggacacggaggtggccgcgtcgtgtggcggcgttgtcttgtcgggttgatggcgctgactctgtcaccacattacaagcgcctcatctgctggtgcgtgtggtggcttcagtattttctaaccagagtggaagcgcacctgcacgtgtgggttccccccctcaacgtccgggggggggcgatgccatcatcttactcatgtgtgttatacacccggctctgatatttgacatcaccaaactgctgctggccgtcttcggacccctttggattcttcaagccagtttgctgaaagtcccctacttgtgcgcgttcaaggccttctccgaatctgcgcgctagcgcggaagttagccggaggtcattacgtgcagatggccatcatcaagttaggggcgcttactggcacctatgtctataaccatctcactcctctccgagactggcgcacaacggcctgcaagacctggccgtggctgtagaaccagtcatcttctcccgaatggagaccaaactcatcacgtggggggcagacaccgccgcgtgcggcgacatcatcaacggcttgcccgttccgcccgcaggggccgggagatattgcttggaccagccgacggaatggcctctaaagggtggaggttgctggcgcccatcacagcgtacgcccagcagacgagaggcctcctagggtgcataatcaccagcctgactggcgggataaaaaccaagtggagggtgaggtccagatcgtgtcaactgctacccaaaccttcctggcaacgtgcatcaatggggtatgctggactgtctaccacggggccggaacgaggaccatcgcatccccaggggtcctgttatccagatgtacaccaatgtggaccaggaccttgtgggctggcctgctcctcaaggttcccgctcattgacaccctgcacctgcggctcctcggacctttacctggtcacgaggcacgccgatgtcttcccgtgcgccggcgaggtgatagcaggggcagcttgctctcgccccggcccatttcctacttgaaaggctcctcggggggtccgctgttgtgccccgcgggacacgccgtgggcatatttagggcgcggtgtgcacccgtggtgtggctaaggcggtggacttcatccctgtggagaacctagagacaaccatgagatccccggtgttcacggacaactcttctccaccagcagtgccccagagcttccaggtggctcacctgcatctcccactggcagcggcaagagcaccaaggtcccggctgcgtacgcagctcagggctacaaagtgctagtgctcaacccctctgttgctgcaacattgggctttggtgcttacatgtccaaggctcaggggtcgatcctaatgtcaggacgggggtgcgaacaattaccaccggcagccccatcacgtactccacctacggcaagttccttgccgacggcgggtgctcaggaggtgcttatgacataataatttgtgatgagtgccacccacggatgccacatccatcttgggcatcggcactgtccttgaccaagcagagaccgcgggggcgagactggttgtgctcgccactgctacccctccgggctccgtcaccgtgccccatcctaacatgaggaggttgctctgtccaccaccggagagatccctttttacggcaaggctattcccctcgaggtcatcaaggggggaaggcatctcatcttctgccactcaaagaaaaagtgtgacgagctcgccgcaaagctggtcgcatgggcatcaatgccgtggcctactaccgcggtcttgacgtgtctgtcatcccgaccagcggcgatgttgtcgtcgtggcgaccgatgctctcatgactggctataccggcgacttcgactctgtgatgactgcaacacgtgtgtcacccagacagtcgatttcagccttgaccctaccttcaccattgagacaaccacgctcccccaagacgctgtctcccggactcaacgtcggggcagaaccggcagggggaagccaggcatctacgatttgtggcaccgggggaacgcccctccggcatgttcgactcgtccgtcatctgtgagtgctatgacgcgggctgtgcttggtatgagctcacgcccgccgagactacagttaggctacgagcgtaatgaacaccccggggctccccgtgtgccaggaccatcttgaattttgggagggcgtctttacgggcctcacccatatagatgcccactttctatcccagacaaagcagagtggagagaacttcccttacctggtagcgtacaagccaccgtgtgcgctagggctcaagcccctcccccatcgtgggaccagatgtggaagtgtttgatccgcctcaaacccaccctccatgggccaacacccctgctatacagactgggcgctgttcaaatgaagtcaccctgacgcacccagtcaccaaatacatcatgacatgcatgtcggctga

SEQ ID NO: 151 - DNA, 4869 bp, Hepatitis C virus
tcgcccacaggacgtcaagttcccgggtggcggtcagatcgttggtggagtttacttgttgccgcgcaggggccctagattgggtgtgcgcgcgacgaggaagacttccgagcggtcgcaacctcgagtagacgtcagcctatccccaaggcgcgtcggcccgagggcaggtcctgggctcagcccgggtacccttggcccctctatggcaatgagggttgcgggtgggcgggatggctcctgtctccccgtggtctcggcctagctggggccccacagacccccggcgtaggtcgcgcaatttgggtaaggtcatcgatacccttacgtgcggcttcgccgacctcatggggtacataccgctcgtcggcgcccctctcggaggcgctgccaggccctggcgcatggcgtcagggttctggaagacggcgtgaactatgcaacagggaatcttcctggttgctctttctctatcttccttctggctctgctctcttgcctgaccgtgcccgcttcagcctacaagtgcgcaactcttcggggctttaccatgtcaccaatgattgccctaactcgagtattgtgtacgaggcggccgatgccattctgcacactccggggtgtgtcccttgtgtttacgagggtaacacctcgaggtgttggtggcggtgacccccacagtggccaccagggacggcaaactccccacgacgcagcttcgacgccacatcgatctgcttgtcgggagtgccaccctctgctcggccctctacgtgggggatctgtgcggtctgtctttcttgtcggccaactgttcaccttctctcccaggcgccaccggacgatgcagaactgcaattgttctatctaccccggccatataacgggccaccgcatggcatgggatatgatgatgaactggtcccctacgtggcattggcggtagctcagctgctccggatcccacaagccatcatggacatgatcgctggtgctcactggggagtcctggcgggcatagcgtatttctccatggtggggaactgggcgaaggtcctgtagtgctgctgctatttgccggcgtcgacgcggagacccacgtcaccgggggagctgccggccgctccacggctgggattgctggtctcttcagcccaggcgccagacagaacatccaactgatcaataccaacggcagtggcacatcaatagcacggccctgaactgcaacgacagcctcaacaccggctggatagcagggctcttctattccaacaaattcaactcttcgggctgtcccgagaggttggccagctgccgacgcctgccgattttgcccagggctggggccccatcagttacgccaacggaagcggccccgacgaacgcccctactgctggcactaccccccaagaccttgtggtattgtgcccgctaagagcgtgtgtggcccggtgtattgcttcctcccagccccgtggtggtgggaacgaccgacaggtcgggcgcgcctacctacaactggggtgaaaatgacacggacgtcttcgtcctcaacaacaccaggccgccgctgggcaattggttcggttgacctggatgaactcaagtggattcaccaaagtgtgcggagcgcccccttgtgtcatcggaggggtgggcaacaacaccttgcgctgccccactgattgcttccgcaaacatccggaagccacatactctcggtgcggctccgtccttggatcacacccaggtgcatggtcgactacccatataggctttggcattatccttgtaccatcaactacaccttattcaaagtcaggatgtacgtgggaggggtcgagcacaggctggaagcgcctgcaactggacgcggggcgaacgctgtgatctggaagacagggacaggtccgagctcagtccgttactgctgtccaccacgcagtggcaggtccttccgtgttcttttacgaccctgccagccttgtccaccggcctctccacctccaccagaacattgtggacgtgcagtacttgtacggggtagggtcaagcatcgcgtcctgggccattaagtgggagtacgtcgttctcctgttccttctgcttgcagacgcgcgcgtctgtcctgcttgtggatgatgttactcatatcccaagcggaggcggctttggagaacctcgtagtactcaatgcagcatccctggccgggacgcacggtcttgtgtccttcctcgtgttcttctgctttgcgtggtatctgaaggtaggtgggcgcccggagcggtctacgccctctacgggatgtggcctctcctcctgctcctgctggcgctgcctcagcgggcatacgcactggacacggaggtggccgcgtcgtgtggcggcgttgtcttgtcgggttgatggcgctgactctgtcaccacattacaagcgcctcatctgctggtgcgtgtggtggcttcagtattttctaaccagagtggaagcgcacctgcacgtgtgggttccccccctcaacgtccgggggggggcgatgccatcatcttactcatgtgtgttatacacccggctctgatatttgacatcaccaaactgctgctggccgtcttcggacccctttggattcttcaagccagtttgctgaaagtcccctacttgtgcgcgttcaaggccttctccgaatctgcgcgctagcgcggaagttagccggaggtcattacgtgcagatggccatcatcaagttaggggcgcttactggcacctatgtctataaccatctcactcctctccgagactggcgcacaacggcctgcaagacctggccgtggctgtagaaccagtcatcttctcccgaatggagaccaaactcatcacgtggggggcagacaccgccgcgtgcggcgacatcatcaacggcttgcccgttccgcccgcaggggccgggagatattgcttggaccagccgacggaatggcctctaaagggtggaggttgctggcgcccatcacagcgtacgcccagcagacgagaggcctcctagggtgcataatcaccagcctgactggcgggataaaaaccaagtggagggtgaggtccagatcgtgtcaactgctacccaaaccttcctggcaacgtgcatcaatggggtatgctggactgtctaccacggggccggaacgaggaccatcgcatccccaggggtcctgttatccagatgtacaccaatgtggaccaggaccttgtgggctggcctgctcctcaaggttcccgctcattgacaccctgcacctgcggctcctcggacctttacctggtcacgaggcacgccgatgtcttcccgtgcgccggcgaggtgatagcaggggcagcttgctctcgccccggcccatttcctacttgaaaggctcctcggggggtccgctgttgtgccccgcgggacacgccgtgggcatatttagggcgcggtgtgcacccgtggtgtggctaaggcggtggacttcatccctgtggagaacctagagacaaccatgagatccccggtgttcacggacaactcttctccaccagcagtgccccagagcttccaggtggctcacctgcatctcccactggcagcggcaagagcaccaaggtcccggctgcgtacgcagctcagggctacaaagtgctagtgctcaacccctctgttgctgcaacattgggctttggtgcttacatgtccaaggctcaggggtcgatcctaatgtcaggacgggggtgcgaacaattaccaccggcagccccatcacgtactccacctacggcaagttccttgccgacggcgggtgctcaggaggtgcttatgacataataatttgtgatgagtgccacccacggatgccacatccatcttgggcatcggcactgtccttgaccaagcagagaccgcgggggcgagactggttgtgctcgccactgctacccctccgggctccgtcaccgtgccccatcctaacatgaggaggttgctctgtccaccaccggagagatccctttttacggcaaggctattcccctcgaggtcatcaaggggggaaggcatctcatcttctgccactcaaagaaaaagtgtgacgagctcgccgcaaagctggtcgcatgggcatcaatgccgtggcctactaccgcggtcttgacgtgtctgtcatcccgaccagcggcgatgttgtcgtcgtggcgaccgatgctctcatgactggctataccggcgacttcgactctgtgatgactgcaacacgtgtgtcacccagacagtcgatttcagccttgaccctaccttcaccattgagacaaccacgctcccccaagacgctgtctcccggactcaacgtcggggcagaaccggcagggggaagccaggcatctacgatttgtggcaccgggggaacgcccctccggcacgttcgactcgtccgtcatctgtgagtgctatgacgcgggctgtgcttggtatgagctcacgcccgccgagactacagttaggctacgagcgtaatgaacaccccggggctccccgtgtgccaggaccatcttgaattttgggagggcgtctttacgggcctcacccatatagatgcccactttctatcccagacaaagcagagtggagagaacttcccttacctggtagcgtacaagccaccgtgtgcgctagggctcaagcccctcccccatcgtgggaccagatgtggaagtgtttgatccgcctcaaacccaccctccatgggccaacacccctgctatacagactgggcgctgttcaaatgaagtcaccctgacgcacccagtcaccaaatacatcatgacatgcatgtcggctga

SEQ ID NO: 152 - DNA, 4869 bp, Hepatitis C virus
tcgcccacaggacgtcaagttcccgggtggcggtcagatcgttggtggagtttacttgttgccgcgcaggggccctagattgggtgtgcgcgcgacgaggaagacttccgagcggtcgcaacctcgagtagacgtcagcctatccccaaggcgcgtcggcccgagggcaggtcctgggctcagcccgggtacccttggcccctctatggcaatgagggttgcgggtgggcgggatggctcctgtctccccgtggtctcggcctagctggggccccacagacccccggcgtaggtcgcgcaatttgggtaaggtcatcgatacccttacgtgcggcttcgccgacctcatggggtacataccgctcgtcggcgcccctctcggaggcgctgccaggccctggcgcatggcgtcagggttctggaagacggcgtgaactatgcaacagggaatcttcctggttgctctttctctatcttccttctggctctgctctcttgcctgaccgtgcccgcttcagcctacaagtgcgcaactcttcggggctttaccatgtcaccaatgattgccctaactcgagtattgtgtacgaggcggccgatgccattctgcacactccggggtgtgtcccttgtgtttacgagggtaacacctcgaggtgttggtggcggtgacccccacagtggccaccagggacggcaaactccccacgacgcagcttcgacgccacatcgatctgcttgtcgggagtgccaccctctgctcggccctctacgtgggggatctgtgcggtctgtctttcttgtcggccaactgttcaccttctctcccaggcgccaccggacgatgcagaactgcaattgttctatctaccccggccatataacgggccaccgcatggcatgggatatgatgatgaactggtcccctacgtggcattggcggtagctcagctgctccggatcccacaagccatcatggacatgatcgctggtgctcactggggagtcctggcgggcatagcgtatttctccatggtggggaactgggcgaaggtcctgtagtgctgctgctatttgccggcgtcgacgcggagacccacgtcaccgggggagctgccggccgctccacggctgggattgctggtctcttcagcccaggcgccagacagaacatccaactgatcaataccaacggcagtggcacatcaatagcacggccctgaactgcaacgacagcctcaacaccggctggatagcagggctcttctattccaacaaattcaactcttcgggctgtcccgagaggttggccagctgccgacgcctgccgattttgcccagggctggggccccatcagttacgccaacggaagcggccccgacgaacgcccctactgctggcactaccccccaagaccttgtggtattgtgcccgctaagagcgtgtgtggcccggtgtattgcttcctcccagccccgtggtggtgggaacgaccgacaggtcgggcgcgcctacctacaactggggtgaaaatgacacggacgtcttcgtcctcaacaacaccaggccgccgctgggcaattggttcggttgacctggatgaactcaagtggattcaccaaagtgtgcggagcgcccccttgtgtcatcggaggggtgggcaacaacaccttgcgctgccccactgattgcttccgcaaacatccgggagccacatactctcggtgcggctccgtccttggatcacacccaggtgcatggtcgactacccatataggctttggcattatccttgtaccatcaactacaccttattcaaagtcaggatgtacgtgggaggggtcgagcacaggctggaagcgcctgcaactggacgcggggcgaacgctgtgatctggaagacagggacaggtccgagctcagtccgttactgctgtccaccacgcagtggcaggtccttccgtgttcttttacgaccctgccagccttgtccaccggcctctccacctccaccagaacattgtggacgtgcagtacttgtacggggtagggtcaagcatcgcgtcctgggccattaagtgggagtacgtcgttctcctgttccttctgcttgcagacgcgcgcgtctgtcctgcttgtggatgatgttactcatatcccaagcggaggcggctttggagaacctcgtagtactcaatgcagcatccctggccgggacgcacggtcttgtgtccttcctcgtgttcttctgctttgcgtggtatctgaaggtaggtgggcgcccggagcggtctacgccctctacgggatgtggcctctcctcctgctcctgctggcgctgcctcagcgggcatacgcactggacacggaggtggccgcgtcgtgtggcggcgttgtcttgtcgggttgatggcgctgactctgtcaccacattacaagcgcctcatctgctggtgcgtgtggtggcttcagtattttctaaccagagtggaagcgcacctgcacgtgtgggttccccccctcaacgtccgggggggggcgatgccatcatcttactcatgtgtgttatacacccggctctgatatttgacatcaccaaactgctgctggccgtcttcggacccctttggattcttcaagccagtttgctgaaagtcccctacttgtgcgcgttcaaggccttctccgaatctgcgcgctagcgcggaagttagccggaggtcattacgtgcagatggccatcatcaagttaggggcgcttactggcacctatgtctataaccatctcactcctctccgagactggcgcacaacggcctgcaagacctggccgtggctgtagaaccagtcatcttctcccgaatggagaccaaactcatcacgtggggggcagacaccgccgcgtgcggcgacatcatcaacggcttgcccgttccgcccgcaggggccgggagatattgcttggaccagccgacggaatggcctctaaagggtggaggttgctggcgcccatcacagcgtacgcccagcagacgagaggcctcctagggtgcataatcaccagcctgactggcgggataaaaaccaagtggagggtgaggtccagatcgtgtcaactgctacccaaaccttcctggcaacgtgcatcaatggggtatgctggactgtctaccacggggccggaacgaggaccatcgcatccccaggggtcctgttatccagatgtacaccaatgtggaccaggaccttgtgggctggcctgctcctcaaggttcccgctcattgacaccctgcacctgcggctcctcggacctttacctggtcacgaggcacgccgatgtcttcccgtgcgccggcgaggtgatagcaggggcagcttgctctcgccccggcccatttcctacttgaaaggctcctcggggggtccgctgttgtgccccgcgggacacgccgtgggcatatttagggcgcggtgtgcacccgtggtgtggctaaggcggtggacttcatccccgtggagaacctagagacaaccatgagatccccggtgttcacggacaactcttctccaccagcagtgccccagagcttccaggtggctcacctgcatctcccactggcagcggcaagagcaccaaggtcccggctgcgtacgcagctcagggctacaaagtgctagtgctcaacccctctgttgctgcaacattgggctttggtgcttacatgtccaaggctcaggggtcgatcctaatgtcaggacgggggtgcgaacaattaccaccggcagccccatcacgtactccacctacggcaagttccttgccgacggcgggtgctcaggaggtgcttatgacataataatttgtgatgagtgccacccacggatgccacatccatcttgggcatcggcactgtccttgaccaagcagagaccgcgggggcgagactggttgtgctcgccactgctacccctccgggctccgtcaccgtgccccatcctaacatgaggaggttgctctgtccaccaccggagagatccctttttacggcaaggctattcccctcgaggtcatcaaggggggaaggcatctcatcttctgccactcaaagaaaaagtgtgacgagctcgccgcaaagctggtcgcatgggcatcaatgccgtggcctactaccgcggtcttgacgtgtctgtcatcccgaccagcggcgatgttgtcgtcgtggcgaccgatgctctcatgactggctataccggcgacttcgactctgtgatgactgcaacacgtgtgtcacccagacagtcgatttcagccttgaccctaccttcaccattgagacaaccacgctcccccaagacgctgtctcccggactcaacgtcggggcagaaccggcagggggaagccaggcatctacgatttgtggcaccgggggaacgcccctccggcatgttcgactcgtccgtcatctgtgagtgctatgacgcgggctgtgcttggtatgagctcacgcccgccgagactacagttaggctacgagcgtaatgaacaccccggggctccccgtgtgccaggaccatcttgaattttgggagggcgtctttacgggcctcacccatatagatgcccactttctatcccagacaaagcagagtggagagaacttcccttacctggtagcgtacaagccaccgtgtgcgctagggctcaagcccctcccccatcgtgggaccagatgtggaagtgtttgatccgcctcaaacccaccctccatgggccaacacccctgctatacagactgggcgctgttcaaatgaagtcaccctgacgcacccagtcaccaaatacatcatgacatgcatgtcggctga

SEQ ID NO: 153 - DNA, 4869 bp, Hepatitis C virus
tcgcccacaggacgtcaagttcccgggtggcggtcagatcgttggtggagtttacttgttgccgcgcaggggccctagattgggtgtgcgcgcgacgaggaagacttccgagcggtcgcaacctcgagtagacgtcagcctatccccaaggcgcgtcggcccgagggcaggtcctgggctcagcccgggtacccttggcccctctatggcaatgagggttgcgggtgggcgggatggctcctgtctccccgtggtctcggcctagctggggccccacagacccccggcgtaggtcgcgcaatttgggtaaggtcatcgatacccttacgtgcggcttcgccgacctcatggggtacataccgctcgtcggcgcccctctcggaggcgctgccaggccctggcgcatggcgtcagggttctggaagacggcgtgaactatgcaacagggaatcttcctggttgctctttctctatcttccttctggctctgctctcttgcctgaccgtgcccgcttcagcctacaagtgcgcaactcttcggggctttaccatgtcaccaatgattgccctaactcgagtattgtgtacgaggcggccgatgccattctgcacactccggggtgtgtcccttgtgtttacgagggtaacacctcgaggtgttggtggcggtgacccccacagtggccaccagggacggcaaactccccacgacgcagcttcgacgccacatcgatctgcttgtcgggagtgccaccctctgctcggccctctacgtgggggatctgtgcggtctgtctttcttgtcggccaactgttcaccttctctcccaggcgccaccggacgatgcagaactgcaattgttctatctaccccggccatataacgggccaccgcatggcatgggatatgatgatgaactggtcccctacgtggcattggcggtagctcagctgctccggatcccacaagccatcatggacatgatcgctggtgctcactggggagtcctggcgggcatagcgtatttctccatggtggggaactgggcgaaggtcctgtagtgctgctgctatttgccggcgtcgacgcggagacccacgtcaccgggggagctgccggccgctccacggctgggattgctggtctcttcagcccaggcgccagacagaacatccaactgatcaataccaacggcagtggcacatcaatagcacggccctgaactgcaacgacagcctcaacaccggctggatagcagggctcttctattccaacaaattcaactcttcgggctgtcccgagaggttggccagctgccgacgcctgccgattttgcccagggctggggccccatcagttacgccaacggaagcggccccgacgaacgcccctactgctggcactaccccccaagaccttgtggtattgtgcccgctaagagcgtgtgtggcccggtgtattgcttcctcccagccccgtggtggtgggaacgaccgacaggtcgggcgcgcctacctacaactggggtgaaaatgacacggacgtcttcgtcctcaacaacaccaggccgccgctgggcaattggttcggttgacctggatgaactcaagtggattcaccaaagtgtgcggagcgcccccttgtgtcatcgggggggtgggcaacaacaccttgcgctgccccactgattgcttccgcaaacatccggaagccacatactctcggtgcggctccgtccttggatcacacccaggtgcatggtcgactacccatataggctttggcattatccttgtaccatcaactacaccttattcaaagtcaggatgtacgtgggaggggtcgagcacaggctggaagcgcctgcaactggacgcggggcgaacgctgtgatctggaagacagggacaggtccgagctcagtccgttactgctgtccaccacgcagtggcaggtccttccgtgttcttttacgaccctgccagccttgtccaccggcctctccacctccaccagaacattgtggacgtgcagtacttgtacggggtagggtcaagcatcgcgtcctgggccattaagtgggagtacgtcgttctcctgttccttctgcttgcagacgcgcgcgtctgtcctgcttgtggatgatgttactcatatcccaagcggaggcggctttggagaacctcgtagtactcaatgcagcatccctggccgggacgcacggtcttgtgtccttcctcgtgttcttctgctttgcgtggtatctgaaggtaggtgggcgcccggagcggtctacgccctctacgggatgtggcctctcctcctgctcctgctggcgctgcctcagcgggcatacgcactggacacggaggtggccgcgtcgtgtggcggcgttgtcttgtcgggttgatggcgctgactctgtcaccacattacaagcgcctcatctgctggtgcgtgtggtggcttcagtattttctaaccagagtggaagcgcacctgcacgtgtgggttccccccctcaacgtccgggggggggcgatgccatcatcttactcatgtgtgttatacacccggctctgatatttgacatcaccaaactgctgctggccgtcttcggacccctttggattcttcaagccagtttgctgaaagtcccctacttgtgcgcgttcaaggccttctccgaatctgcgcgctagcgcggaagttagccggaggtcattacgtgcaggtggccatcatcaagttaggggcgcttactggcacctatgtctataaccatctcactcctctccgagactggcgcacaacggcctgcaagacctggccgtggctgtagaaccagtcatcttctcccgaatggagaccaaactcatcacgtggggggcagacaccgccgcgtgcggcgacatcatcaacggcttgcccgttccgcccgcaggggccgggagatattgcttggaccagccgacggaatggcctctaaagggtggaggttgctggcgcccatcacagcgtacgcccagcagacgagaggcctcctagggtgcataatcaccagcctgactggcgggataaaaaccaagtggagggtgaggtccagatcgtgtcaactgctacccaaaccttcctggcaacgtgcatcaatggggtatgctggactgtctaccacggggccggaacgaggaccatcgcatccccaggggtcctgttatccagatgtacaccaatgtggaccaggaccttgtgggctggcctgctcctcaaggttcccgctcattgacaccctgcacctgcggctcctcggacctttacctggtcacgaggcacgccgatgtcttcccgtgcgccggcgaggtgatagcaggggcagcttgctctcgccccggcccatttcctacttgaaaggctcctcggggggtccgctgttgtgccccgcgggacacgccgtgggcatatttagggcgcggtgtgcacccgtggtgtggctaaggcggtggacttcatccctgtggagaacctagagacaaccatgagatccccggtgttcacggacaactcttctccaccagcagtgccccagagcttccaggtggctcacctgcatctcccactggcagcggcaagagcaccaaggtcccggctgcgtacgcagctcagggctacaaagtgctagtgctcaacccctctgttgctgcaacattgggctttggtgcttacatgtccaaggctcaggggtcgatcctaatgtcaggacgggggtgcgaacaattaccaccggcagccccatcacgtactccacctacggcaagttccttgccgacggcgggtgctcaggaggtgcttatgacataataatttgtgatgagtgccacccacggatgccacatccatcttgggcatcggcactgtccttgaccaagcagagaccgcgggggcgagactggttgtgctcgccactgctacccctccgggctccgtcaccgtgccccatcctaacatgaggaggttgctctgtccaccaccggagagatccctttttacggcaaggctattcccctcgaggtcatcaaggggggaaggcatctcatcttctgccactcaaagaaaaagtgtgacgagctcgccgcaaagctggtcgcatgggcatcaatgccgtggcctactaccgcggtcttgacgtgtctgtcatcccgaccagcggcgatgttgtcgtcgtggcgaccgatgctctcatgactggctataccggcgacttcgactctgtgatgactgcaacacgtgtgtcacccagacagtcgatttcagccttgaccctaccttcaccattgagacaaccacgctcccccaagacgctgtctcccggactcaacgtcggggcagaaccggcagggggaagccaggcatctacgatttgtggcaccgggggaacgcccctccggcatgttcgactcgtccgtcatctgtgagtgctatgacgcgggctgtgcttggtatgagctcacgcccgccgagactacagttaggctacgagcgtaatgaacaccccggggctccccgtgtgccaggaccatcttgaattttgggagggcgtctttacgggcctcacccatatagatgcccactttctatcccagacaaagcagagtggagagaacttcccttacctggtagcgtacaagccaccgtgtgcgctagggctcaagcccctcccccatcgtgggaccagatgtggaagtgtttgatccgcctcaaacccaccctccatgggccaacacccctgctatacagactgggcgctgttcaaatgaagtcaccctgacgcacccagtcaccaaatacatcatgacatgcatgtcggctga

SEQ ID NO: 154 - DNA, 4867 bp, Hepatitis C virus
tcgcccacaggacgtcaagttcccgggtggcggtcagatcgttggtggagtttacttgttgccgcgcaggggccctagattgggtgtgcgcgcgacgaggaagacttccgagcggtcgcaacctcgagtagacgtcagcctatccccaaggcgcgtcggcccgagggcaggtcctgggctcagcccgggtacccttggcccctctatggcaatgagggttgcgggtgggcgggatggctcctgtctccccgtggtctcggcctagctggggccccacagacccccggcgtaggtcgcgcaatttgggtaaggtcatcgatacccttacgtgcggcttcgccgacctcatggggtacataccgctcgtcggcgcccctctcggaggcgctgccaggccctggcgcatggcgtcagggttctggaagacggcgtgaactatgcaacagggaatcttcctggttgctctttctctatcttccttctggctctgctctcttgcctgaccgtgcccgcttcagcctacaagtgcgcaactcttcggggctttaccatgtcaccaatgattgccctaactcgagtattgtgtacgaggcggccgatgccattctgcacactccggggtgtgtcccttgtgtttacgagggtaacacctcgaggtgttggtggcggtgacccccacagtggccaccagggacggcaaactccccacgacgcagcttcgacgccacatcgatctgcttgtcgggagtgccaccctctgctcggccctctacgtgggggatctgtgcggtctgtctttcttgtcggccaactgttcaccttctctcccaggcgccaccggacgatgcagaactgcaattgttctatctaccccggccatataacgggccaccgcatggcatgggatatgatgatgaactggtcccctacgtggcattggcggtagctcagctgctccggatcccacaagccatcatggacatgatcgctggtgctcactggggagtcctggcgggcatagcgtatttctccatggtggggaactgggcgaaggtcctgtagtgctgctgctatttgccggcgtcgacgcggagacccacgtcaccgggggagctgccggccgctccacggctgggattgctggtctcttcagcccaggcgccagacagaacatccaactgatcaataccaacggcagtggcacatcaatagcacggccctgaactgcaacgacagcctcaacaccggctggatagcagggctcttctattccaacaaattcaactcttcgggctgtcccgagaggttggccagctgccgacgcctgccgattttgcccagggctggggccccatcagttacgccaacggaagcggccccgacgaacgcccctactgctggcactaccccccaagaccttgtggtattgtgcccgctaagagcgtgtgtggcccggtgtattgcttcctcccagccccgtggtggtgggaacgaccgacaggtcgggcgcgcctacctacaactggggtgaaaatgacacggacgtcttcgtcctcaacaacaccaggccgccgctgggcaattggttcggttgacctggatgaactcaagtggattcaccaaagtgtgcggagcgcccccttgtgtcatcggaggggtgggcaacaacaccttgcgctgccccactgattgcttccgcaaacatccggaagccacatactctcggtgcggctccgtccttggatcacacccaggtgcatggtcgactacccatataggctttggcattatccttgtaccatcaactacaccttattcaaagtcaggatgtacgtgggaggggtcgagcacaggctggaagcgcctgcaactggacgcggggcgaacgctgtgatctggaagacagggacaggtccgagctcagtccgttactgctgtccaccacgcagtggcaggtccttccgtgttcttttacgaccctgccagccttgtccaccggcctctccacctccaccagaacattgtggacgtgcagtacttgtacggggtagggtcaagcatcgcgtcctgggccattaagtgggagtacgtcgttctcctgttccttctgcttgcagacgcgcgtctgctctgcttgtggatgatgttactcatatcccaagcggaggcggctttggagaacctcgtagtactcaatgcagcatccctggccgggacgcacggtcttgtgtccttcctcgtgttcttctgctttgcgtggtatctgaagggaggtgggcgcccggagcggtctacgccctctacgggatgtggcctctcctcctgctcctgctggcgctgcctcagcgggcatacgcactggacacggaggtggccgcgtcgtgtggcggcgttgttctgtcgggttgatggcgctgactctgtcaccacattacaagcgcctcatctgctggtgcgtgtggtggcttcagtattttctaaccagagtggaagcgcacctgcacgtgtgggttccccccctcaacgtccggggggggcggatgccatcatcttactcatgtgtgttatacacccggctctgatatttgacatcaccaaactgctgctggccgtcttcggacccctttggattcttcaagccagtttgctgaaagtcccctacttcggcgcgttcaaggccttctccgaatctgcgcgctagcgcggaagttagccggaggtcattacgtgcagatggccatcatcaagttaggggcgcttactggcacctatgtctataaccatctcactcctctccgagactgggccacaacggcctgcaagacctggccgtggctgtagaaccagtcatcttctcccgaatggagaccaaactcatcacgtggggggcagacaccgccgcgtgcggcgacatcatcaacggcttgcccgtctcgcccgcaggggccgggagatattgcttggaccagccgacggaatggcctctaaagggtggaggttgctggcgcccatcacagcgtacgcccagcagacgagaggcctcctagggtgcataatcaccagcctgactggccggataaaaaccaagtggagggtgaggtccagatcgtgtcaactgctacccaaaccttcctggcaacgtgcatcaatggggtatgctggactgtctaccacggggccggaacgaggaccatcgcatcaccaggggtcctgttatccagatgtacaccaatgtggaccaggaccttgtgggctggcctgctcctcaaggttcccgctcattgacaccctgcacctgcggctcctcggacctttacctggtcacgaggcacgccgatgtcatcccgtgcgccggcgaggtgatagcaggggcagcttgctctcgccccggcccatttcctatttgaaaggctcctcggggggtccgctgttgtgccccgcgggacacgccgtgggcatatttagggccgggtgtgcacccgtggtgtggctaaggcggtggacttcatccctgtggagaacctagagacaaccatgagatccccggtgttcacggacaactcttctccaccagcagtgccccagagcttccaggtggctcacctgcatgccccactggcagcggcaagagcaccaaggtcccggctgcgtacgcagctcagggctacaaagtgctagtgctcaacccctctgttgctgcaacattgggctttggtgcttacatgtccaaggctcatgggtcgatcctaatgtcaggacgggggtgcgaacaattaccaccggcagccccatcacgtactccacctacggcaagttccttgccgacggcgggtgctcaggaggtgcttatgacataataatttgtgatgagtgccactcacggatgccacatccatcttgggcatcggcactgtccttgaccaagcagagaccgcgggggcgagactggttgtgctcgccactgctacccctccgggctccgtcaccgtgccccatcctaacatcgggaggttgctctgtccaccaccggagagatccctttttacggcaaggctattcccctcgaggtcatcaaggggggaaggcatctcatcttctgccactcaaagaaaaagtgtgacgagctcgccgcaaagctggtcgcattggcatcaatgccgtggcctactaccgcggtcttgacgtgtctgtcatcccgaccagcggcgatgttgtcgtcgtggcgaccgatgctctcatgactggctataccggcgacttcgactctgtgatagctgcaacacgtgtgtcacccagacagtcgatttcagccttgaccctaccttcaccattgagacaaccacgctcccccaagacgctgtctcccggactcaacgtcggggcagaaccggcagggggaagccaggcatctacagtttgtggcaccgggggaacgcccctccggcatgttcgactcgtccgtcatctgtgagtgctatgacgcgggctgtgcttggtatgagctcacgcccgccgagactacagttaggctacgagcgtacagaacaccccggggctccccgtgtgccaggaccatcttgaattttgggagggcgtctttacgggcctcacccatatagatgcccactttctatcccagacaaagcagagtggagagaacttcccttacctggtagcgtaccagccaccgtgtgcgctagggctcaagcccctcccccatcgtgggaccagatgtggaagtgtttgatccgcctcaaacccaccctccatgggccaacacccctgctatacagactgggcgctgttcagatgaagtcaccctgacgcacccagtcaccaaatacatcatgacatgcatgtcggctga

SEQ ID NO: 155 - DNA, 4869 bp, Hepatitis C virus
tcgcccacaggacgtcaagttcccgggtggcggtcagatcgttggtggagtttacttgttgccgcgcaggggccctagattgggtgtgcgcgcgacgaggaagacttccgagcggtcgcaacctcgagtagacgtcagcctatccccaaggcgcgtcggcccgagggcaggtcctgggctcagcccgggtacccttggcccctctatggcaatgagggttgcgggtgggcgggatggctcctgtctccccgtggtctcggcctagctggggccccacagacccccggcgtaggtcgcgcaatttgggtaaggtcatcgatacccttacgtgcggcttcgccgacctcatggggtacataccgctcgtcggcgcccctctcggaggcgctgccaggccctggcgcatggcgtcagggttctggaagacggcgtgaactatgcaacagggaatcttcctggttgctctttctctatcttccttctggctctgctctcttgcctgaccgtgcccgcttcagcctacaagtgcgcaactcttcggggctttaccatgtcaccaatgattgccctaactcgagtattgtgtacgaggcggccgatgccattctgcacactccggggtgtgtcccttgtgtttacgagggtaacacctcgaggtgttggtggcggtgacccccacagtggccaccagggacggcaaactccccacgacgcagcttcgacgccacatcgatctgcttgtcgggagtgccaccctctgctcggccctctacgtgggggatctgtgcggtctgtctttcttgtcggccaactgttcaccttctctcccaggcgccaccggacgatgcagaactgcaattgttctatctaccccggccatataacgggccaccgcatggcatgggatatgatgatgaactggtcccctacgtggcattggcggtagctcagctgctccggatcccacaagccatcatggacatgatcgctggtgctcactggggagtcctggcgggcatagcgtatttctccatggtggggaactgggcgaaggtcctgtagtgctgctgctatttgccggcgtcgacgcggagacccacgtcaccgggggagctgccggccgctccacggctgggattgctggtctcttcagcccaggcgccagacagaacatccaactgatcaataccaacggcagtggcacatcaatagcacggccctgaactgcaacgacagcctcaacaccggctggatagcagggctcttctattccaacaaattcaactcttcgggctgtcccgagaggttggccagctgccgacgcctgccgattttgcccagggctggggccccatcagttacgccaacggaagcggccccgacgaacgcccctactgctggcactaccccccaagaccttgtggtattgtgcccgctaagagcgtgtgtggcccggtgtattgcttcctcccagccccgtggtggtgggaacgaccgacaggtcgggcgcgcctacctacaactggggtgaaaatgacacggacgtcttcgtcctcaacaacaccaggccgccgctgggcaattggttcggttgacctggatgaactcaagtggattcaccaaagtgtgcggagcgcccccttgtgtcatcggaggggtgggcaacaacaccttgcgctgccccactgattgcttccgcaaacatccggaagccacatactctcggtgcggctccgtccttggatcacacccaggtgcatggtcgactacccatataggctttggcattatccttgtaccatcaactacaccttattcaaagtcaggatgtacgtgggaggggtcgagcacaggctggaagcgcctgcaactggacgcggggcgaacgctgtgatctggaagacagggacaggtccgagctcagtccgttactgctgtccaccacgcagtggcaggtccttccgtgttcttttacgaccctgccagccttgtccaccggcctctccacctccaccagaacattgtggacgtgcagtacttgtacggggtagggtcaagcatcgcgtcctgggccattaagtgggagtacgtcgttctcctgttccttctgcttgcagacgcgcgcgtctgtcctgcttgtggatgatgttactcatatcccaagcggaggcggctttggagaacctcgtagtactcaatgcagcatccctggccgggacgcacggtcttgtgtccttcctcgtgttcttctgctttgcgtggtatctgaaggtaggtgggcgcccggagcggtctacgccctctacgggatgtggcctctcctcctgctcctgctggcgctgcctcagcgggcatacgcactggacacggaggtggccgcgtcgtgtggcggcgttgtcttgtcgggttgatggcgctgactctgtcaccacattacaagcgcctcatctgctggtgcgtgtggtggcttcagtattttctaaccagagtggaagcgcacctgcacgtgtgggttccccccctcaacgtccgggggggggcgatgccatcatcttactcatgtgtgttatacacccggctctgatatttgacatcaccaaactgctgctggccgtcttcggacccctttggattcttcaagccagtttgctgaaagtcccctacttgtgcgcgttcaaggccttctccgaatctgcgcgctagcgcggaagttagccggaggtcattacgtgcagatggccatcatcaagttaggggcgcttactggcacctatgtctataaccatctcactcctctccgagactggcgcacaacggcctgcaagacctggccgtggctgtagaaccagtcatcttctcccgaatggagaccaaactcatcacgtggggggcagacaccgccgcgtgcggcgacatcatcaacggcttgcccgttccgcccgcaggggccgggagatattgcttggaccagccgacggaatggcctctaaagggtggaggttgctggcgcccatcacagcgtacgcccagcagacgagaggcctcctagggtgcataatcaccagcctgactggcgggataaaaaccaagtggagggtgaggtccagatcgtgtcaactgctacccaaaccttcctggcaacgtgcatcaatggggtatgctggactgtctaccacggggccggaacgaggaccatcgcatccccaggggtcctgttatccagatgtacaccaatgtggaccaggaccttgtgggctggcctgctcctcaaggttcccgctcattgacaccctgcacctgcggctcctcggacctttacctggtcacgaggcacgccgatgtcttcccgtgcgccggcgaggtgatagcaggggcagcttgctctcgccccggcccatttcctacttaaaaggctcctcggggggtccgctgttgtgccccgcgggacacgccgtgggcatatttagggcgcggtgtgcacccgtggtgtggctaaggcggtggacttcatccctgtggagaacctagagacaaccatgagatccccggtgttcacggacaactcttctccaccagcagtgccccagagcttccaggtggctcacctgcatctcccactggcagcggcaagagcaccaaggtcccggctgcgtacgcagctcagggctacaaagtgctagtgctcaacccctctgttgctgcaacattgggctttggtgcttacatgtccaaggctcaggggtcgatcctaatgtcaggacgggggtgcgaacaattaccaccggcagccccatcacgtactccacctacggcaagttccttgccgacggcgggtgctcaggaggtgcttatgacataataatttgtgatgagtgccacccacggatgccacatccatcttgggcatcggcactgtccttgaccaagcagagaccgcgggggcgagactggttgtgctcgccactgctacccctccgggctccgtcaccgtgccccatcctaacatgaggaggttgctctgtccaccaccggagagatccctttttacggcaaggctattcccctcgaggtcatcaaggggggaaggcatctcatcttctgccactcaaagaaaaagtgtgacgagctcgccgcaaagctggtcgcatgggcatcaatgccgtggcctactaccgcggtcttgacgtgtctgtcatcccgaccagcggcgatgttgtcgtcgtggcgaccgatgctctcatgactggctataccggcgacttcgactctgtgatgactgcaacacgtgtgtcacccagacagtcgatttcagccttgaccctaccttcaccattgagacaaccacgctcccccaagacgctgtctcccggactcaacgtcggggcagaaccggcagggggaagccaggcatctacgatttgtggcaccgggggaacgcccctccggcatgttcgactcgtccgtcatctgtgagtgctatgacgcgggctgtgcttggtatgagctcacgcccgccgagactacagttaggctacgagcgtaatgaacaccccggggctccccgtgtgccaggaccatcttgaattttgggagggcgtctttacgggcctcacccatatagatgcccactttctatcccagacaaagcagagtggagagaacttcccttacctggtagcgtacaagccaccgtgtgcgctagggctcaagcccctcccccatcgtgggaccagatgtggaagtgtttgatccgcctcaaacccaccctccatgggccaacacccctgctatacagactgggcgctgttcaaatgaagtcaccctgacgcacccagtcaccaaatacatcatgacatgcatgtcggctga

SEQ ID NO: 156 - DNA, 4869 bp, Hepatitis C virus
tcgcccacaggacgtcaagttcccgggtggcggtcagatcgttggtggagtttacttgttgccgcgcaggggccctagattgggtgtgcgcgcgacgaggaagacttccgagcggtcgcaacctcgagtagacgtcagcctatccccaaggcgcgtcggcccgagggcaggtcctgggctcagcccgggtacccttggcccctctatggcaatgagggttgcgggtgggcgggatggctcctgtctccccgtggtctcggcctagctggggccccacagacccccggcgtaggtcgcgcaatttgggtaaggtcatcgatacccttacgtgcggcttcgccgacctcatggggtacataccgctcgtcggcgcccctctcggaggcgctgccaggccctggcgcatggcgtcagggttctggaagacggcgtgaactatgcaacagggaatcttcctggttgctctttctctatcttccttctggctctgctctcttgcctgaccgtgcccgcttcagcctacaagtgcgcaactcttcggggctttaccatgtcaccaatgattgccctaactcgagtattgtgtacgaggcggccgatgccattctgcacactccggggtgtgtcccttgtgtttacgagggtaacacctcgaggtgttggtggcggtgacccccacagtggccaccagggacggcaaactccccacgacgcagcttcgacgccacatcgatctgcttgtcgggagtgccaccctctgctcggccctctacgtgggggatctgtgcggtctgtctttcttgtcggccaactgttcaccttctctcccaggcgccaccggacgatgcagaactgcaattgttctatctaccccggccatataacgggccaccgcatggcatgggatatgatgatgaactggtcccctacgtggcattggcggtagctcagctgctccggatcccacaagccatcatggacatgatcgctggtgctcactggggagtcctggcgggcatagcgtatttctccatggtggggaactgggcgaaggtcctgtagtgctgctgctatttgccggcgtcgacgcggagacccacgtcaccgggggagctgccggccgctccacggctgggattgctggtctcttcagcccaggcgccagacagaacatccaactgatcaataccaacggcagtggcacatcaatagcacggccctgaactgcaacgacagcctcaacaccggctggatagcagggctcttctattccaacaaattcaactcttcgggctgtcccgagaggttggccagctgccgacgcctgccgattttgcccagggctggggccccatcagttacgccaacggaagcggccccgacgaacgcccctactgctggcactaccccccaagaccttgtggtattgtgcccgctaagagcgtgtgtggcccggtgtattgcttcctcccagccccgtggtggtgggaacgaccgacaggtcgggcgcgcctacctacaactggggtgaaaatgacacggacgtcttcgtcctcaacaacaccaggccgccgctgggcaattggttcggttgacctggatgaactcaagtggattcaccaaagtgtgcggagcgcccccttgtgtcatcggaggggtgggcaacaacaccttgcgctgccccactgattgcttccgcaaacatccggaagccacatactctcggtgcggctccgtccttggatcacacccaggtgcatggtcgactacccatataggctttggcattatccttgtaccatcaactacaccttattcaaagtcaggatgtacgtgggaggggtcgagcacaggctggaagcgcctgcaactggacgcggggcgaacgctgtgatctggaagacagggacaggtccgagctcagtccgttactgctgtccaccacgcagtggcaggtccttccgtgttcttttacgaccctgccagccttgtccaccggcctctccacctccaccagaacattgtggacgtgcagtacttgtacggggtagggtcaagcatcgcgtcctgggccattaagtgggagtacgtcgttctcctgttccttctgcttgcagacgcgcgcgtctgtcctgcttgtggatgatgttactcatatcccaagcggaggcggctttggagaacctcgtagtactcaatgcagcatccctggccgggacgcacggtcttgtgtccttcctcgtgttcttctgctttgcgtggtatctgaaggtaggtgggcgcccggagcggtctacgccctctacgggatgtggcctctcctcctgctcctgctggcgctgcctcagcgggcatacgcactggacacggaggtggccgcgtcgtgtggcggcgttgtcttgtcgggttgatggcgctgactctgtcaccacattacaagcgcctcatctgctggtgcgtgtggtggcttcagtattttctaaccagagtggaagcgcacctgcacgtgtgggttccccccctcaacgtccgggggggggcgatgccatcatcttactcatgtgtgttatacacccggctctgatatttgacatcaccaaactgctgctggccgtcttcggacccctttggattcttcaagccagtttgctgaaagtcccctacttgtgcgcgttcaaggccttctccgaatctgcgcgctagcgcggaagttagccggaggtcattacgtgcagatggccatcatcaagttaggggcgcttactggcacctatgtctataaccatctcactcctctccgagactggcgcacaacggcctgcaagacctggccgtggctgtagaaccagtcatcttctcccgaatggagaccaaactcatcacgtggggggcagacactgccgcgtgcggcgacatcatcaacggcttgcccgttccgcccgcaggggccgggagatattgcttggaccagccgacggaatggcctctaaagggtggaggttgctggcgcccatcacagcgtacgcccagcagacgagaggcctcctagggtgcataatcaccagcctgactggcgggataaaaaccaagtggagggtgaggtccagatcgtgtcaactgctacccaaaccttcctggcaacgtgcatcaatggggtatgctggactgtctaccacggggccggaacgaggaccatcgcatccccaggggtcctgttatccagatgtacaccaatgtggaccaggaccttgtgggctggcctgctcctcaaggttcccgctcattgacaccctgcacctgcggctcctcggacctttacctggtcacgaggcacgccgatgtcttcccgtgcgccggcgaggtgatagcaggggcagcttgctctcgccccggcccatttcctacttgaaaggctcctcggggggtccgctgttgtgccccgcgggacacgccgtgggcatatttagggcgcggtgtgcacccgtggtgtggctaaggcggtggacttcatccctgtggagaacctagagacaaccatgagatccccggtgttcacggacaactcttctccaccagcagtgccccagagcttccaggtggctcacctgcatctcccactggcagcggcaagagcaccaaggtcccggctgcgtacgcagctcagggctacaaagtgctagtgctcaacccctctgttgctgcaacattgggctttggtgcttacatgtccaaggctcaggggtcgatcctaatgtcaggacgggggtgcgaacaattaccaccggcagccccatcacgtactccacctacggcaagttccttgccgacggcgggtgctcaggaggtgcttatgacataataatttgtgatgagtgccacccacggatgccacatccatcttgggcatcggcactgtccttgaccaagcagagaccgcgggggcgagactggttgtgctcgccactgctacccctccgggctccgtcaccgtgccccatcctaacatgaggaggttgctctgtccaccaccggagagatccctttttacggcaaggctattcccctcgaggtcatcaaggggggaaggcatctcatcttctgccactcaaagaaaaagtgtgacgagctcgccgcaaagctggtcgcatgggcatcaatgccgtggcctactaccgcggtcttgacgtgtctgtcatcccgaccagcggcgatgttgtcgtcgtggcgaccgatgctctcatgactggctataccggcgacttcgactctgtgatgactgcaacacgtgtgtcacccagacagtcgatttcagccttgaccctaccttcaccattgagacaaccacgctcccccaagacgctgtctcccggactcaacgtcggggcagaaccggcagggggaagccaggcatctacgatttgtggcaccgggggaacgcccctccggcatgttcgactcgtccgtcatctgtgagtgctatgacgcgggctgtgcttggtatgagctcacgcccgccgagactacagttaggctacgagcgtaatgaacaccccggggctccccgtgtgccaggaccatcttgaattttgggagggcgtctttacgggcctcacccatatagatgcccactttctatcccagacaaagcagagtggagagaacttcccttacctggtagcgtacaagccaccgtgtgcgctagggctcaagcccctcccccatcgtgggaccagatgtggaagtgtttgatccgcctcaagcccaccctccatgggccaacacccctgctatacagactgggcgctgttcaaatgaagtcaccctgacgcacccagtcaccaaatacatcatgacatgcatgtcggctga

SEQ ID NO: 157 - DNA, 4869 bp, Hepatitis C virus; identical to SEQ ID NO: 96

SEQ ID NO: 158 - DNA, 4869 bp, Hepatitis C virus; identical to SEQ ID NO: 96

SEQ ID NO: 159 - DNA, 4869 bp, Hepatitis C virus
tcgcccacaggacgtcaagttcccgggtggcggtcagatcgttggtggagtttacttgttgccgcgcaggggccctagattgggtgtgcgcgcgacgaggaagacttccgagcggtcgcaacctcgagtagacgtcagcctatccccaaggcgcgtcggcccgagggcaggtcctgggctcagcccgggtacccttggcccctctatggcaatgagggttgcgggtgggcgggatggctcctgtctccccgtggtctcggcctagctggggccccacagacccccggcgtaggtcgcgcaatttgggtaaggtcatcgatacccttacgtgcggcttcgccgacctcatggggtacataccgctcgtcggcgcccctctcggaggcgctgccaggccctggcgcatggcgtcagggttctggaagacggcgtgaactatgcaacagggaatcttcctggttgctctttctctatcttccttctggctctgctctcttgcctgaccgtgcccgcttcagcctacaagtgcgcaactcttcggggctttaccatgtcaccaatgattgccctaactcgagtattgtgtacgaggcggccgatgccattctgcacactccggggtgtgtcccttgtgtttacgagggtaacacctcgaggtgttggtggcggtgacccccacagtggccaccagggacggcaaactccccacgacgcagcttcgacgccacatcgatctgcttgtcgggagtgccaccctctgctcggccctctacgtgggggatctgtgcggtctgtctttcttgtcggccaactgttcaccttctctcccaggcgccaccggacgatgcagaactgcaattgttctatctaccccggccatataacgggccaccgcatggcatgggatatgatgatgaactggtcccctacgtggcattggcggtagctcagctgctccggatcccacaagccatcatggacatgatcgctggtgctcactggggagtcctggcgggcatagcgtatttctccatggtggggaactgggcgaaggtcctgtagtgctgctgctatttgccggcgtcgacgcggagacccacgtcaccgggggagctgccggccgctccacggctgggattgctggtctcttcagcccaggcgccagacagaacatccaactgatcaataccaacggcagtggcacatcaatagcacggccctgaactgcaacgacagcctcaacaccggctggatagcagggctcttctattccaacaaattcaactcttcgggctgtcccgagaggttggccagctgccgacgcctgccgattttgcccagggctggggccccatcagttacgccaacggaagcggccccgacgaacgcccctactgctggcactaccccccaagaccttgtggtattgtgcccgctaagagcgtgtgtggcccggtgtattgcttcctcccagccccgtggtggtgggaacgaccgacaggtcgggcgcgcctacctacaactggggtgaaaatgacacggacgtcttcgtcctcaacaacaccaggccgccgctgggcaattggttcggttgacctggatgaactcaagtggattcaccaaagtgtgcggagcgcccccttgtgtcatcggaggggtgggcaacaacaccttgcgctgccccactgattgcttccgcaaacatccggaagccacatactctcggtgcggctccgtccttggatcacacccaggtgcatggtcgactacccatataggctttggcattatccttgtaccatcaactacaccttattcaaagtcaggatgtacgtgggaggggtcgagcacaggctggaagcgcctgcaactggacgcggggcgaacgctgtgatctggaagacagggacaggtccgagctcagtccgttactgctgtccaccacgcagtggcaggtccttccgtgttcttttacgaccctgccagccttgtccaccggcctctccacctccaccagaacattgtggacgtgcagtacttgtacggggtagggtcaagcatcgcgtcctgggccattaagtgggagtacgtcgttctcctgttccttctgcttgcagacgcgcgcgtctgtcctgcttgtggatgatgttactcatatcccaagcggaggcggctttggagaacctcgtagtactcaatgcagcatccctggccgggacgcacggtcttgtgtccttcctcgtgttcttctgctttgcgtggtatctgaaggtaggtgggcgcccggagcggtctacgccctctacgggatgtggcctctcctcctgctcctgctggcgctgcctcagcgggcatacgcactggacacggaggtggccgcgtcgtgtggcggcgttgtcttgtcgggttgatggcgctgactctgtcaccacattacaagcgcctcatctgctggtgcgtgtggtggcttcagtattttctaaccagagtggaagcgcacctgcacgtgtgggttccccccctcaacgtccgggggggggcgatgccatcatcttactcatgtgtgttatacacccggctctgatatttgacatcaccaaactgctgctggccgtcttcggacccctttggattcttcaagccagtttgctgaaagtcccctacttgtgcgcgttcaaggccttctccgaatctgcgcgctagcgcggaagttagccggaggtcattacgtgcagatggccatcatcaagttaggggcgcttactggcacctatgtctataaccatctcactcctctccgagactggcgcacaacggcctgcaagacctggccgtggctgtagaaccagtcatcttctcccgaatggagaccaaactcatcacgtggggggcagacaccgccgcgtgcggcgacatcatcaacggcttgcccgttccgcccgcaggggccgggagatattgcttggaccagccgacggaatggcctctaaagggtggaggttgctggcgcccatcacagcgtacgcccagcagacgagaggcctcctagggtgcataatcaccagcctgactggcgggataaaaaccaagtggagggtgaggtccagatcgtgtcaactgctacccaaaccttcctggcaacgtgcatcaatggggtatgctggactgtctaccacggggccggaacgaggaccatcgcatccccaggggtcctgttatccagatgtacaccaatgtggaccaggaccttgtgggctggcctgctcctcaaggttcccgctcattgacaccctgcacctgcggctcctcggacctttacctggtcacgaggcacgccgatgtcttcccgtgcgccggcgaggtgatagcaggggcagcttgctctcgccccggcccatttcctacttgaaaggctcctcggggggtccgctgttgtgccccgcgggacacgccgtgggcatatttagggcgcggtgtgcacccgtggtgtggctaaggcggtggacttcatccctgtggagaacctagagacaaccatgagatccccggtgttcacggacaactcttctccaccagcagtgccccagagcttccaggtggctcacctgcatctcccactggcagcggcaagagcaccaaggtcccggctgcgtacgcagctcagggctacaaagtgctagtgctcaacccctctgttgctgcaacattgggctttggtgcttacatgtccaaggctcaggggtcgatcctaatgtcaggacgggggtgcgaacaattaccaccggcagccccatcacgtactccacctacggcaagttccttgccgacggcgggtgctcaggaggtgcttatgacataataatttgtgatgagtgccacccacggatgccacatccatcttgggcatcggcactgtccttgaccaagcagagaccgcgggggcgagactggttgtgctcgccactgctacccctccgggctccgtcaccgtgccccatcctaacatgaggaggttgctctgtccaccaccggagagatccctttttacggcaaggctattcccctcgaggtcatcaaggggggaaggcatctcatcttctgccactcaaagaaaaagtgtgacgagctcgccgcaaagctggtcgcatgggcatcaatgccgtggcctactaccgcggtcttgacgtgtctgtcatcccgaccagcggcgatgttgtcgtcgtggcgaccgatgctctcatgactggctataccggcgacttcgactctgtgatgactgcaacacgtgtgtcacccagacagtcgatttcagccttgaccctaccttcaccattgagacaaccacgctcccccaagacgctgtctcccggactcaacgtcggggcagaaccggcagggggaagccaggcatctacgatttgtggcaccgggggaacgcccctccggcatgttcgactcgtccgtcatctgtgagtgctatgacgcgggctgtgcttggtatgagctcacgcccgccgagactacagttaggctacgagcgtaatgaacaccccggggctccccgtgtgccaggaccatcttgaattttgggagggcgtctttacgggcctcacccatatagatgcccactttctatcccagacaaagcagagtggagagaacttcccttacctggtagcgtacaagccaccgtgtgcgctagggctcaagcccctcccccatcgtgggaccagatgtggaagtgtttgatccgcctcaaacccaccctccatgggccaacacccctgctatacagactgggcgctgttcaaatgaaatcaccctgacgcacccagtcaccaaatacatcatgacatgcatgtcggctga

SEQ ID NO: 160 - DNA, 4869 bp, Hepatitis C virus
tcgcccacaggacgtcaagttcccgggtggcggtcagatcgttggtggagtttacttgttgccgcgcaggggccctagattgggtgtgcgcgcgacgaggaagacttccgagcggtcgcaacctcgagtagacgtcagcctatccccaaggcgcgtcggcccgagggcaggtcctgggctcagcccgggtacccttggcccctctatggcaatgagggttgcgggtgggcgggatggctcctgtctccccgtggtctcggcctagctggggccccacagacccccggcgtaggtcgcgcaatttgggtaaggtcatcgatacccttacgtgcggcttcgccgacctcatggggtacataccgctcgtcggcgcccctctcggaggcgctgccaggccctggcgcatggcgtcagggttctggaagacggcgtgaactatgcaacagggaatcttcctggttgctctttctctatcttccttctggctctgctctcttgcctgaccgtgcccgcttcagcctacaagtgcgcaactcttcggggctttaccatgtcaccaatgattgccctaactcgagtattgtgtacgaggcggccgatgccattctgcacactccggggtgtgtcccttgtgtttacgagggtaacacctcgaggtgttggtggcggtgacccccacagtggccaccagggacggcaaactccccacgacgcagcttcgacgccacatcgatctgcttgtcgggagtgccaccctctgctcggccctctacgtgggggatctgtgcggtctgtctttcttgtcggccaactgttcaccttctctcccaggcgccaccggacgatgcagaactgcaattgttctatctaccccggccatataacgggccaccgcatggcatgggatatgatgatgaactggtcccctacgtggcattggcggtagctcagctgctccggatcccacaagccatcatggacatgatcgctggtgctcactggggagtcctggcgggcatagcgtatttctccatggtggggaactgggcgaaggtcctgtagtgctgctgctatttgccggcgtcgacgcggagacccacgtcaccgggggagctgccggccgctccacggctgggattgctggtctcttcagcccaggcgccagacagaacatccaactgatcaataccaacggcagtggcacatcaatagcacggccctgaactgcaacgacagcctcaacaccggctggatagcagggctcttctattccaacaaattcaactcttcgggctgtcccgagaggttggccagctgccgacgcctgccgattttgcccagggctggggccccatcagttacgccaacggaagcggccccgacgaacgcccctactgctggcactaccccccaagaccttgtggtattgtgcccgctaagagcgtgtgtggcccggtgtattgcttcctcccagccccgtggtggtgggaacgaccgacaggtcgggcgcgcctacctacaactggggtgaaaatgacacggacgtcttcgtcctcaacaacaccaggccgccgctgggcaattggttcggttgacctggatgaactcaagtggattcaccaaagtgtgcggagcgcccccttgtgtcatcggaggggtgggcaacaacaccttgcgctgccccactgattgcttccgcaaacatccggaagccacatactctcggtgcggctccgtccttggatcacacccaggtgcatggtcgactacccatataggctttggcattatccttgtaccatcaactacaccttattcaaagtcaggatgtacgtgggaggggtcgagcacaggctggaagcgcctgcaactggacgcggggcgaacgctgtgatctggaagacagggacaggtccgagctcagtccgttactgctgtccaccacgcagtggcaggtccttccgtgttcttttacgaccctgccagccttgtccaccggcctctccacctccaccagaacattgtggacgtgcagtacttgtacggggtagggtcaagcatcgcgtcctgggccattaagtgggagtacgtcgttctcctgttccttctgcttgcagacgcgcgcgtctgtcctgcttgtggatgatgttactcatatcccaagcggaggcggctttggagaacctcgtagtactcaatgcagcatccctggccgggacgcacggtcttgtgtccttcctcgtgttcttctgctttgcgtgatatctgaaggtaggtgggcgcccggagcggtctacgccctctacgggatgtggcctctcctcctgctcctgctggcgctgcctcagcgggcatacgcactggacacggaggtggccgcgtcgtgtggcggcgttgtcttgtcgggttgatggcgctgactctgtcaccacattacaagcgcctcatctgctggtgcgtgtggtggcttcagtattttctaaccagagtggaagcgcacctgcacgtgtgggttccccccctcaacgtccgggggggggcgatgccatcatcttactcatgtgtgttatacacccggctctgatatttgacatcaccaaactgctgctggccgtcttcggacccctttggattcttcaagccagtttgctgaaagtcccctacttgtgcgcgttcaaggccttctccgaatctgcgcgctagcgcggaagttagccggaggtcattacgtgcagatggccatcatcaagttaggggcgcttactggcacctatgtctataaccatctcactcctctccgagactggcgcacaacggcctgcaagacctggccgtggctgtagaaccagtcatcttctcccgaatggagaccaaactcatcacgtggggggcagacaccgccgcgtgcggcgacatcatcaacggcttgcccgttccgcccgcaggggccgggagatattgcttggaccagccgacggaatggcctctaaagggtggaggttgctggcgcccatcacagcgtacgcccagcagacgagaggcctcctagggtgcataatcaccagcctgactggcgggataaaaaccaagtggagggtgaggtccagatcgtgtcaactgctacccaaaccttcctggcaacgtgcatcaatggggtatgctggactgtctaccacggggccggaacgaggaccatcgcatccccaggggtcctgttatccagatgtacaccaatgtggaccaggaccttgtgggctggcctgctcctcaaggttcccgctcattgacaccctgcacctgcggctcctcggacctttacctggtcacgaggcacgccgatgtcttcccgtgcgccggcgaggtgatagcaggggcagcttgctctcgccccggcccatttcctacttgaaaggctcctcggggggtccgctgttgtgccccgcgggacacgccgtgggcatatttagggcgcggtgtgcacccgtggtgtggctaaggcggtggacttcatccctgtggagaacctagagacaaccatgagatccccggtgttcacggacaactcttctccaccagcagtgccccagagcttccaggtggctcacctgcatctcccactggcagcggcaagagcaccaaggtcccggctgcgtacgcagctcagggctacaaagtgctagtgctcaacccctctgttgctgcaacattgggctttggtgcttacatgtccaaggctcaggggtcgatcctaatgtcaggacgggggtgcgaacaattaccaccggcagccccatcacgtactccacctacggcaagttccttgccgacggcgggtgctcaggaggtgcttatgacataataatttgtgatgagtgccacccacggatgccacatccatcttgggcatcggcactgtccttgaccaagcagagaccgcgggggcgagactggttgtgctcgccactgctacccctccgggctccgtcaccgtgccccatcctaacatgaggaggttgctctgtccaccaccggagagatccctttttacggcaaggctattcccctcgaggtcatcaaggggggaaggcatctcatcttctgccactcaaagaaaaagtgtgacgagctcgccgcaaagctggtcgcatgggcatcaatgccgtggcctactaccgcggtcttgacgtgtctgtcatcccgaccagcggcgatgttgtcgtcgtggcgaccgatgctctcatgactggctataccggcgacttcgactctgtgatgactgcaacacgtgtgtcacccagacagtcgatttcagccttgaccctaccttcaccattgagacaaccacgctcccccaagacgctgtctcccggactcaacgtcggggcagaaccggcagggggaagccaggcatctacgatttgtggcaccgggggaacgcccctccggcatgttcgactcgtccgtcatctgtgagtgctatgacgcgggctgtgcttggtatgagctcacgcccgccgagactacagttaggctacgagcgtaatgaacaccccggggctccccgtgtgccaggaccatcttgaattttgggagggcgtctttacgggcctcacccatatagatgcccactttctatcccagacaaagcagagtggagagaacttcccttacctggtagcgtacaagccaccgtgtgcgctagggctcaagcccctcccccatcgtgggaccagatgtggaagtgtttgatccgcctcaaacccaccctccatgggccaacacccctgctatacagactgggcgctgttcaaatgaagtcaccctgacgcacccagtcaccaaatacatcatgacatgcatgtcggctga

SEQ ID NO: 161 - DNA, 4869 bp, Hepatitis C virus
tcgcccacaggacgtcaagttcccgggtggcggtcagatcgttggtggagtttacttgttgccgcgcaggggccctagattgggtgtgcgcgcgacgaggaagacttccgagcggtcgcaacctcgagtagacgtcagcctatccccaaggcgcgtcggcccgagggcaggtcctgggctcagcccgggtacccttggcccctctatggcaatgagggttgcgggtgggcgggatggctcctgtctccccgtggtctcggcctagctggggccccacagacccccggcgtaggtcgcgcaatttgggtaaggtcatcgatacccttacgtgcggcttcgccgacctcatggggtacataccgctcgtcggcgcccctctcggaggcgctgccaggccctggcgcatggcgtcagggttctggaagacggcgtgaactatgcaacagggaatcttcctggttgctctttctctatcttccttctggctctgctctcttgcctgaccgtgcccgcttcagcctacaagtgcgcaactcttcggggctttaccatgtcaccaatgattgccctaactcgagtattgtgtacgaggcggccgatgccattctgcacactccggggtgtgtcccttgtgtttacgagggtaacacctcgaggtgttggtggcggtgacccccacagtggccaccagggacggcaaactccccacgacgcagcttcgacgccacatcgatctgcttgtcgggagtgccaccctctgctcggccctctacgtgggggatctgtgcggtctgtctttcttgtcggccaactgttcaccttctctcccaggcgccaccggacgatgcagaactgcaattgttatatctaccccggccatataacgggccaccgcatggcatgggatatgatgatgaactggtcccctacgtggcattggcggtagctcagctgctccggatcccacaagccatcatggacatgatcgctggtgctcactggggagtcctggcgggcatagcgtatttctccatggtggggaactgggcgaaggtcctgtagtgctgctgctatttgccggcgtcgacgcggagacccacgtcaccgggggagctgccggccgctccacggctgggattgctggtctcttcagcccaggcgccagacagaacatccaactgatcaataccaacggcagtggcacatcaatagcacggccctgaactgcaacgacagcctcaacaccggctggatagcagggctcttctattccaacaaattcaactcttcgggctgtcccgagaggttggccagctgccgacgcctgccgattttgcccagggctggggccccatcagttacgccaacggaagcggccccgacgaacgcccctactgctggcactaccccccaagaccttgtggtattgtgcccgctaagagcgtgtgtggcccggtgtattgcttcctcccagccccgtggtggtgggaacgaccgacaggtcgggcgcgcctacctacaactggggtgaaaatgacacggacgtcttcgtcctcaacaacaccaggccgccgctgggcaattggttcggttgacctggatgaactcaagtggattcaccaaagtgtgcggagcgcccccttgtgtcatcggaggggtgggcaacaacaccttgcgctgccccactgattgcttccgcaaacatccggaagccacatactctcggtgcggctccgtccttggatcacacccaggtgcatggtcgactacccatataggctttggcattatccttgtaccatcaactacaccttattcaaagtcaggatgtacgtgggaggggtcgagcacaggctggaagcgcctgcaactggacgcggggcgaacgctgcgatctggaagacagggacaggtccgagctcagtccgttactgctgtccaccacgcagtggcaggtccttccgtgttcttttacgaccctgccagccttgtccaccggcctctccacctccaccagaacattgtggacgtgcagtacttgtacggggtagggtcaagcatcgcgtcctgggccattaagtgggagtacgtcgttctcctgttccttctgcttgcagacgcgcgcgtctgtcctgcttgtggatgatgttactcatatcccaagcggaggcggctttggagaacctcgtagtactcaatgcagcatccctggccgggacgcacggtcttgtgtccttcctcgtgttcttctgctttgcgtggtatctgaaggtaggtgggcgcccggagcggtctacgccctctacgggatgtggcctctcctcctgctcctgctggcgctgcctcagcgggcatacgcactggacacggaggtggccgcgtcgtgtggcggcgttgtcttgtcgggttgatggcgctgactctgtcaccacattacaagcgcctcatctgctggtgcgtgtggtggcttcagtattttctaaccagagtggaagcgcacctgcacgtgtgggttccccccctcaacgtccgggggggggcgatgccatcatcttactcatgtgtgttatacacccggctctgatatttgacatcaccaaactgctgctggccgtcttcggacccctttggattcttcaagccagtttgctgaaagtcccctacttgtgcgcgttcaaggccttctccgaatctgcgcgctagcgcggaagttagccggaggtcattacgtgcagatggccatcatcaagttaggggcgcttactggcacctatgtctataaccatctcactcctctccgagactggcgcacaacggcctgcaagacctggccgtggctgtagaaccagtcatcttctcccgaatggagaccaaactcatcacgtggggggcagacaccgccgcgtgcggcgacatcatcaacggcttgcccgttccgcccgcaggggccgggagatattgcttggaccagccgacggaatggcctctaaagggtggaggttgctggcgcccatcacagcgtacgcccagcagacgagaggcctcctagggtgcataatcaccagcctgactggcgggataaaaaccaagtggagggtgaggtccagatcgtgtcaactgctacccaaaccttcctggcaacgtgcatcaatggggtatgctggactgtctaccacggggccggaacgaggaccatcgcatccccaggggtcctgttatccagatgtacaccaatgtggaccaggaccttgtgggctggcctgctcctcaaggttcccgctcattgacaccctgcacctgcggctcctcggacctttacctggtcacgaggcacgccgacgtcttcccgtgcgccggcgaggtgatagcaggggcagcttgctctcgccccggcccatttcctacttgaaaggctcctcggggggtccgctgttgtgccccgcgggacacgccgtgggcatatttagggcgcggtgtgcacccgtggtgtggctaaggcggtggacttcatccctgtggagaacctagagacaaccatgagatccccggtgttcacggacaactcttctccaccagcagtgccccagagcttccaggtggctcacctgcatctcccactggcagcggcaagagcaccaaggtcccggctgcgtacgcagctcagggctacaaagtgctagtgctcaacccctctgttgctgcaacattgggctttggtgcttacatgtccaaggctcaggggtcgatcctaatgtcaggacgggggtgcgaacaattaccaccggcagccccatcacgtactccacctacggcaagttccttgccgacggcgggtgctcaggaggtgcttatgacataataatttgtgatgagtgccacccacggatgccacatccatcttgggcatcggcactgtccttgaccaagcagagaccgcgggggcgagactggttgtgctcgccactgctacccctccgggctccgtcaccgtgccccatcctaacatgaggaggttgctctgtccaccaccggagagatccctttttacggcaaggctattcccctcgaggtcatcaaggggggaaggcatctcatcttctgccactcaaagaaaaagtgtgacgagctcgccgcaaagctggtcgcatgggcatcaatgccgtggcctactaccgcggtcttgacgtgtctgtcatcccgaccagcggcgatgttgtcgtcgtggcgaccgatgctctcatgactggctataccggcgacttcgactctgtgatgactgcaacacgtgtgtcacccagacagtcgatttcagccttgaccctaccttcaccattgagacaaccacgctcccccaagacgctgtctcccggactcaacgtcggggcagaaccggcagggggaagccaggcatctacgatttgtggcaccgggggaacgcccctccggcatgttcgactcgtccgtcatctgtgagtgctatgacgcgggctgtgcttggtatgagctcacgcccgccgagactacagttaggctacgagcgtaatgaacaccccggggctccccgtgtgccaggaccatcttgaattttgggagggcgtctttacgggcctcacccatatagatgcccactttctatcccagacaaagcagagtggagagaacttcccttacctggtagcgtacaagccaccgtgtgcgctagggctcaagcccctcccccatcgtgggaccagatgtggaagtgtttgatccgcctcaaacccaccctccatgggccaacacccctgctatacagactgggcgctgttcaaatgaagtcaccctgacgcacccagtcaccaaatacatcatgacatgcatgtcggctga

SEQ ID NO: 162 - DNA, 4869 bp, Hepatitis C virus
tcgcccacaggacgtcaagttcccgggtggcggtcagatcgttggtggagtttacttgttgccgcgcaggggccctagattgggtgtgcgcgcgacgaggaagacttccgagcggtcgcaacctcgagtagacgtcagcctatccccaaggcgcgtcggcccgagggcaggtcctgggctcagcccgggtacccttggcccctctatggcaatgagggttgcgggtgggcgggatggctcctgtctccccgtggtctcggcctagctggggccccacagacccccggcgtaggtcgcgcaatttgggtaaggtcatcgatacccttacgtgcggcttcgccgacctcatggggtacataccgctcgtcggcgcccctctcggaggcgctgccaggccctggcgcatggcgtcagggttctggaagacggcgtgaactatgcaacagggaatcttcctggttgctctttctctatcttccttctggctctgctctcttgcctgaccgtgcccgcttcagcctacaagtgcgcaactcttcggggctttaccatgtcaccaatgattgccctaactcgagtattgtgtacgaggcggccgatgccattctgcacactccggggtgtgtcccttgtgtttacgagggtaacacctcgaggtgttggtggcggtgacccccacagtggccaccagggacggcaaactccccacgacgcagcttcgacgccacatcgatctgcttgtcgggagtgccaccctctgctcggccctctacgtgggggatctgtgcggtctgtctttcttgtcggccaactgttcaccttctctcccaggcgccaccggacgatgcagaactgcaattgtcctatctaccccggccatataacgggccaccgcatggcatgggatatgatgatgaactggtcccctacgtggcattggcggtagctcagctgctccggatcccacaagccatcatggacatgatcgctggtgctcactggggagtcctggcgggcatagcgtatttctccatggtggggaactgggcgaaggtcctgtagtgctgctgctatttgccggcgtcgacgcggagacccacgtcaccgggggagctgccggccgctccacggctgggattgctggtctcttcagcccaggcgccagacagaacatccaactgatcaataccaacggcagtggcacatcaatagcacggccctgaactgcaacgacagcctcaacaccggctggatagcagggctcttctattccaacaaattcaactcttcgggctgtcccgagaggttggccagctgccgacgcctgccgattttgcccagggctggggccccatcagttacgccaacggaagcggccccgacgaacgcccctactgctggcactaccccccaagaccttgtggtattgtgcccgctaagagcgtgtgtggcccggtgtattgcttcctcccagccccgtggtggtgggaacgaccgacaggtcgggcgcgcctacctacaactggggtgaaaatgacacggacgtcttcgtcctcaacaacaccaggccgccgctgggcaattggttcggttgacctggatgaactcaagtggattcaccaaagtgtgcggagcgcccccttgtgtcatcggaggggtgggcaacaacaccttgcgctgccccactgattgcttccgcaaacatccggaagccacatactctcggtgcggctccgtccttggatcacacccaggtgcatggtcgactacccatataggctttggcattatccttgtaccatcaactacaccttattcaaagtcaggatgtacgtgggaggggtcgagcacaggctggaagcgcctgcaactggacgcggggcgaacgctgtgatctggaagacagggacaggtccgagctcagtccgttactgctgtccaccacgcagtggcaggtccttccgtgttcttttacgaccctgccagccttgtccaccggcctctccacctccaccagaacattgtggacgtgcagtacttgtacggggtagggtcaagcatcgcgtcctgggccattaagtgggagtacgtcgttctcctgttccttctgcttgcagacgcgcgcgtctgtcctgcttgtggatgatgttactcatatcccaagcggaggcggctttggagaacctcgtagtactcaatgcagcatccctggccgggacgcacggtcttgtgtccttcctcgtgttcttctgctttgcgtggtatctgaaggtaggtgggcgcccggagcggtctacgccctctacgggatgtggcctctcctcctgctcctgctggcgctgcctcagcgggcatacgcactggacacggaggtggccgcgtcgtgtggcggcgttgtcttgtcgggttgatggcgctgactctgtcaccacattacaagcgcctcatctgctggtgcgtgtggtggcttcagtattttctaaccagagtggaagcgcacctgcacgtgtgggttccccccctcaacgtccgggggggggcgatgccatcatcttactcatgtgtgttatacacccggctctgatatttgacatcaccaaactgctgctggccgtcttcggacccctttggattcttcaagccagtttgctgaaagtcccctacttgtgcgcgttcaaggccttctccgaatctgcgcgctagcgcggaagttagccggaggtcattacgtgcagatggccatcatcaagttaggggcgcttactggcacctatgtctataaccatctcactcctctccgagactggcgcacaacggcctgcaagacctggccgtggctgtagaaccagtcatcttctcccgaatggagaccaaactcatcacgtggggggcagacaccgccgcgtgcggcgacatcatcaacggcttgcccgttccgcccgcaggggccgggagatattgcttggaccagccgacggaatggcctctaaagggtggaggttgctggcgcccatcacagcgtacgcccagcagacgagaggcctcctagggtgcataatcaccagcctgactggcgggataaaaaccaagtggagggtgaggtccagatcgtgtcaactgctacccaaaccttcctggcaacgtgcatcaatggggtatgctggactgtctaccacggggccggaacgaggaccatcgcatccccaggggtcctgttatccagatgtacaccaatgtggaccaggaccttgtgggctggcctgctcctcaaggttcccgctcattgacaccctgcacctgcggctcctcggacctttacctggtcacgaggcacgccgatgtcttcccgtgcgccggcgaggtgatagcaggggcagcttgctctcgccccggcccatttcctacttgaaaggctcctcggggggtccgctgttgtgccccgcgggacacgccgtgggcatatttagggcgcggtgtgcacccgtggtgtggctaaggcggtggacttcatccctgtggagaacctagagacaaccatgagatctccggtgttcacggacaactcttctccaccagcagtgccccagagcttccaggtggctcacctgcatctcccactggcagcggcaagagcaccaaggtcccggctgcgtacgcagctcagggctacaaagtgctagtgctcaacccctctgttgctgcaacattgggctttggtgcttacatgtccaaggctcaggggtcgatcctaatgtcaggacgggggtgcgaacaattaccaccggcagccccatcacgtactccacctacggcaagttccttgccgacggcgggtgctcaggaggtgcttatgacataataatttgtgatgagtgccacccacggatgccacatccatcttgggcatcggcactgtccttgaccaagcagagaccgcgggggcgagactggttgtgctcgccactgctacccctccgggctccgtcaccgtgccccatcctaacatgaggaggttgctctgtccaccaccggagagatccctttttacggcaaggctattcccctcgaggtcatcaaggggggaaggcatctcatcttctgccactcaaagaaaaagtgtgacgagctcgccgcaaagctggtcgcatgggcatcaatgccgtggcctactaccgcggtcttgacgtgtctgtcatcccgaccagcggcgatgttgtcgtcgtggcgaccgatgctctcatgactggctataccggcgacttcgactctgtgatgactgcaacacgtgtgtcacccagacagtcgatttcagccttgaccctaccttcaccattgagacaaccacgctcccccaagacgctgtctcccggactcaacgtcggggcagaaccggcagggggaagccaggcatctacgatttgtggcaccgggggaacgcccctccggcatgttcgactcgtccgtcatctgtgagtgctatgacgcgggctgtgcttggtatgagctcacgcccgccgagactacagttaggctacgagcgtaatgaacaccccggggctccccgtgtgccaggaccatcttgaattttgggagggcgtctttacgggcctcacccatatagatgcccactttctatcccagacaaagcagagtggagagaacttcccttacctggtagcgtacaagccaccgtgtgcgctagggctcaagcccctcccccatcgtgggaccagatgtggaagtgtttgatccgcctcaaacccaccctccatgggccaacacccctgctatacagactgggcgctgttcaaatgaagtcaccctgacgcacccagtcaccaaatacatcatgacatgcatgtcggctga

SEQ ID NO: 163 - DNA, 4869 bp, Hepatitis C virus
tcgcccacaggacgtcaagttcccgggtggcggtcagatcgttggtggagtttacttgttgccgcgcaggggccctagattgggtgtgcgcgcgacgaggaagacttccgagcggtcgcaacctcgagtagacgtcagcctatccccaaggcgcgtcggcccgagggcaggtcctgggctcagcccgggtacccttggcccctctatggcaatgagggttgcgggtgggcgggatggctcctgtctccccgtggtctcggcctagctggggccccacagacccccggcgtaggtcgcgcaatttgggtaaggtcatcgatacccttacgtgcggcttcgccgacctcatggggtacataccgctcgtcggcgcccctctcggaggcgctgccaggccctggcgcatggcgtcagggttctggaagacggcgtgaactatgcaacagggaatcttcctggttgctctttctctatcttccttctggctctgctctcttgcctgaccgtgcccgcttcagcctacaagtgcgcaactcttcggggctttaccatgtcaccaatgattgccctaactcgagtattgtgtacgaggcggccgatgccattctgcacactccggggtgtgtcccttgtgtttacgagggtaacacctcgaggtgttggtggcagtgacccccacagtggccaccagggacggcaaactccccacgacgcagcttcgacgccacatcgatctgcttgtcgggagtgccaccctctgctcggccctctacgtgggggatctgtgcggtctgtctttcttgtcggccaactgttcaccttctctcccaggcgccaccggacgatgcagaactgcaattgttctatctaccccggccatataacgggccaccgcatggcatgggatatgatgatgaactggtcccctacgtggcattggcggtagctcagctgctccggatcccacaagccatcatggacatgatcgctggtgctcactggggagtcctggcgggcatagcgtatttctccatggtggggaactgggcgaaggtcctgtagtgctgctgctatttgccggcgtcgacgcggagacccacgtcaccgggggagctgccggccgctccacggctgggattgctggtctcttcagcccaggcgccagacagaacatccaactgatcaataccaacggcagtggcacatcaatagcacggccctgaactgcaacgacagcctcaacaccggctggatagcagggctcttctattccaacaaattcaactcttcgggctgtcccgagaggttggccagctgccgacgcctgccgattttgcccagggctggggccccatcagttacgccaacggaagcggccccgacgaacgcccctactgctggcactaccccccaagaccttgtggtattgtgcccgctaagagcgtgtgtggcccggtgtattgcttcctcccagccccgtggtggtgggaacgaccgacaggtcgggcgcgcctacctacaactggggtgaaaatgacacggacgtcttcgtcctcaacaacaccaggccgccgctgggcaattggttcggttgacctggatgaactcaagtggattcaccaaagtgtgcggagcgcccccttgtgtcatcggaggggtgggcaacaacaccttgcgctgccccactgattgcttccgcaaacatccggaagccacatactctcggtgcggctccgtccttggatcacacccaggtgcatggtcgactacccatataggctttggcattatccttgtaccatcaactacaccttattcaaagtcaggatgtacgtgggaggggtcgagcacaggctggaagcgcctgcaactggacgcggggcgaacgctgtgatctggaagacagggacaggtccgagctcagtccgttactgctgtccaccacgcagtggcaggtccttccgtgttcttttacgaccctgccagccttgtccaccggcctctccacctccaccagaacattgtggacgtgcagtacttgtacggggtagggtcaagcatcgcgtcctgggccattaagtgggagtacgtcgttctcctgttccttctgcttgcagacgcgcgcgtctgtcctgcttgtggatgatgttactcatatcccaagcggaggcggctttggagaacctcgtagtactcaatgcagcatccctggccgggacgcacggtcttgtgtccttcctcgtgttcttctgctttgcgtggtatctgaaggtaggtgggcgcccggagcggtctacgccctctacgggatgtggcctctcctcctgctcctgctggcgctgcctcagcgggcatacgcactggacacggaggtggccgcgtcgtgtggcggcgttgtcttgtcgggttgatggcgctgactctgtcaccacattacaagcgcctcatctgctggtgcgtgtggtggcttcagtattttctaaccagagtggaagcgcacctgcacgtgtgggttccccccctcaacgtccgggggggggcgatgccatcatcttactcatgtgtgttatacacccggctctgatatttgacatcaccaaactgctgctggccgtcttcggacccctttggattcttcaagccagtttgctgaaagtcccctacttgtgcgcgttcaaggccttctccgaatctgcgcgctagcgcggaagttagccggaggtcattacgtgcagatggccatcatcaagttaggggcgcttactggcacctatgtctataaccatctcactcctctccgagactggcgcacaacggcctgcaagacctggccgtggctgtagaaccggtcatcttctcccgaatggagaccaaactcatcacgtggggggcagacaccgccgcgtgcggcgacatcatcaacggcttgcccgttccgcccgcaggggccgggagatattgcttggaccagccgacgggatggcctctaaagggtggaggttgctggcgcccatcacagcgtacgcccagcagacgagaggcctcctagggtgcataatcaccagcctgactggcgggataaaaaccaagtggagggtgaggtccagatcgtgtcaactgctacccaaaccttcctggcaacgtgcatcaatggggtatgctggactgtctaccacggggccggaacgaggaccatcgcatccccaggggtcctgttatccagatgtacaccaatgtggaccaggaccttgtgggctggcctgctcctcaaggttcccgctcattgacaccctgcacctgcggctcctcggacctttacctggtcacgaggcacgccgatgtcttcccgtgcgccggcgaggtgatagcaggggcagcttgctctcgccccggcccatttcctacttgaaaggctcctcggggggtccgctgttgtgccccgcgggacacgccgtgggcatatttagggcgcggtgtgcacccgtggtgtggctaaggcggtggacttcatccctgtggagaacctagagacaaccatgagatccccggtgttcacggacaactcttctccaccagcagtgccccagagcttccaggtggctcacctgcatctcccactggcagcggcaagagcaccaaggtcccggctgcgtacgcagctcagggctacaaagtgctagtgctcaacccctctgttgctgcaacattgggctttggtgcttacatgtccaaggctcaggggtcgatcctaatgtcaggacgggggtgcgaacaattaccaccggcagccccatcacgtactccacctacggcaagttccttgccgacggcgggtgctcaggaggtgcttatgacataataatttgtgatgagtgccacccacggatgccacatccatcttgggcatcggcactgtccttgaccaagcagagaccgcgggggcgagactggttgtgctcgccactgctacccctccgggctccgtcaccgtgccccatcctaacatgaggaggttgctctgtccaccaccggagagatccctttttacggcaaggctattcccctcgaggtcatcaaggggggaaggcatctcatcttctgccactcaaagaaaaagtgtgacgagctcgccgcaaagctggtcgcatgggcatcaatgccgtggcctactaccgcggtcttgacgtgtctgtcatcccgaccagcggcgatgttgtcgtcgtggcgaccgatgctctcatgactggctataccggcgacttcgactctgtgatgactgcaacacgtgtgtcacccagacagtcgatttcagccttgaccctaccttcaccattgagacaaccacgctcccccaagacgctgtctcccggactcaacgtcggggcagaaccggcagggggaagccaggcatctacgatttgtggcaccgggggaacgcccctccggcatgttcgactcgtccgtcatctgtgagtgctatgacgcgggctgtgcttggtatgagctcacgcccgccgagactacagttaggctacgagcgtaatgaacaccccggggctccccgtgtgccaggaccatcttgaattttgggagggcgtctttacgggcctcacccatatagatgcccactttctatcccagacaaagcagagtggagagaacttcccttacctggtagcgtacaagccaccgtgtgcgctagggctcaagcccctcccccatcgtgggaccagatgtggaagtgtttgatccgcctcaaacccaccctccatgggccaacacccctgctatacagactgggcgctgttcaaatgaagtcaccctgacgcacccagtcaccaaatacatcatgacatgcatgtcggctga

SEQ ID NO: 164 - DNA, 4869 bp, Hepatitis C virus
tcgcccacaggacgtcaagttcccgggtggcggtcagatcgttggtggagtttacttgttgccgcgcaggggccctagattgggtgtgcgcgcgacgaggaagacttccgagcggtcgcaacctcgagtagacgtcagcctatccccaaggcgcgtcggcccgagggcaggtcctgggctcagcccgggtacccttggcccctctatggcaatgagggttgcgggtgggcgggatggctcctgtctccccgtggtctcggcctagctggggccccacagacccccggcgtaggtcgcgcaatttgggtaaggtcatcgatacccttacgtgcggcttcgccgacctcatggggtacataccgctcgtcggcgcccctctcggaggcgctgccaggccctggcgcatggcgtcagggttctggaagacggcgtgaactatgcaacagggaatcttcctggttgctctttctctatcttccttctggctctgctctcttgcctgaccgtgcccgcttcagcctacaagtgcgcaactcttcggggctttaccatgtcaccaatgattgccctaactcgagtattgtgtacgaggcggccgatgccattctgcacactccggggtgtgtcccttgtgtttacgagggtaacacctcgaggtgttggtggcggtgacccccacagtggccaccagggacggcaaactccccacgacgcagcttcgacgccacatcgatctgcttgtcgggagtgccaccctctgctcggccctctacgtgggggatctgtgcggtctgtctttcttgtcggccaactgttcaccttctctcccaggcgccaccggacgatgcagaactgcaattgttctatctaccccggccatataacgggccaccgcatggcatgggatatgatgatgaactggtcccctacgtggcattggcggtagctcagctgctccggatcccacaagccatcatggacatgatcgctggtgctcactggggagtcctggcgggcatagcgtatttctccatggtggggaactgggcgaaggtcctgtagtgctgctgctatttgccggcgtcgacgcggagacccacgtcaccgggggagctgccggccgctccacggctgggattgctggtctcttcagcccaggcgccagacagaacatccaactgatcaataccaacggcagtggcacatcaatagcacggccctgaactgcaacgacagcctcaacaccggctggatagcagggctcttctattccaacaaattcaactcttcgggctgtcccgagaggttggccagctgccgacgcctgccgattttgcccagggctggggccccatcagttacgccaacggaagcggccccgacgaacgcccctactgctggcactaccccccaagaccttgtggtattgtgcccgctaagagcgtgtgtggcccggtgtattgcttcctcccagccccgtggtggtgggaacgaccgacaggtcgggcgcgcctacctacaactggggtgaaaatgacacggacgtcttcgtcctcaacaacaccaggccgccgctgggcaattggttcggttgacctggatgaactcaagtggattcaccaaagtgtgcggagcgcccccttgtgtcatcggaggggtgggcaacaacaccttgcgctgccccactgattgcttccgcaaacatccggaagccacatactctcggtgcggctccgtccttggatcacacccaggtgcatggtcgactacccatataggctttggcattatccttgtaccatcaactacaccttattcaaagtcaggatgtacgtgggaggggtcgagcacaggctggaagcgcctgcaactggacgcggggcgaacgctgtgatctggaagacagggacaggtccgagctcagtccgttactgctgtccaccacgcagtggcaggtccttccgtgttcttttacgaccctgccagccttgtccaccggcctctccacctccaccagaacattgtggacgtgcagtacttgtacggggtagggtcaagcatcgcgtcctgggccattaagtgggagtacgtcgttctcctgttccttctgcttgcagacgcgcgcgtctgtcctgcttgtggatgatgttactcatatcccaagcggaggcggctttggagaacctcgtagtactcaatgcagcatccctggccgggacgcacggtcttgtgtccttcctcgtgttcttccgctttgcgtggtatctgaaggtaggtgggcgcccggagcggtctacgccctctacgggatgtggcctctcctcctgctcctgctggcgctgcctcagcgggcatacgcactggacacggaggtggccgcgtcgtgtggcggcgttgtcttgtcgggttgatggcgctgactctgtcaccacattacaagcgcctcatctgctggtgcgtgtggtggcttcagtattttctaaccagagtggaagcgcacctgcacgtgtgggttccccccctcaacgtccgggggggggcgatgccatcatcttactcatgtgtgttatacacccggctctgatatttgacatcaccaaactgctgctggccgtcttcggacccctttggattcttcaagccagtttgctgaaagtcccctacttgtgcgcgttcaaggccttctccgaatctgcgcgctagcgcggaagttagccggaggtcattacgtgcagatggccatcatcaagttaggggcgcttactggcacctatgtctataaccatctcactcctctccgagactggcgcacaacggcctgcaagacctggccgtggctgtagaaccagtcatcttctcccgaatggagaccaaactcatcacgtggggggcagacaccgccgcgtgcggcgacatcatcaacggcttgcccgttccgcccgcaggggccgggagatattgcttggaccagccgacggaatggcctctaaagggtggaggttgctggcgcccatcacagcgtacgcccagcagacgagaggcctcctagggtgcataatcaccagcctgactggcgggataaaaaccaagtggagggtgaggtccagatcgtgtcaactgctacccaaaccttcctggcaacgtgcatcaatggggtatgctggactgtctaccacggggccggaacgaggaccatcgcatccccaggggtcctgttatccagatgtacaccaatgtggaccaggaccttgtgggctggcctgctcctcaaggttcccgctcattgacaccctgcacctgcggctcctcggacctttacctggtcacgaggcacgccgatgtcttcccgtgcgccggcgaggtgatagcaggggcagcttgctctcgccccggcccatttcctacttgaaaggctcctcggggggtccgctgttgtgccccgcgggacacgccgtgggcatatttagggcgcggtgtgcacccgtggtgtggctaaggcggtggacttcatccctgtggagaacctagagacaaccatgagatccccggtgttcacggacaactcttctccaccagcagtgccccagagcttccaggtggctcacctgcatctcccactggcagcggcaagagcaccaaggtcccggctgcgtacgcagctcagggctacaaagtgctagtgctcaacccctctgttgctgcaacattgggctttggtgcttacatgtccaaggctcaggggtcgatcctaatgtcaggacgggggtgcgaacaattaccaccggcagccccatcacgtactccacctacggcaagttccttgccgacggcgggtgctcaggaggtgcttatgacataataatttgtgatgagtgccacccacggatgccacatccatcttgggcatcggcactgtccttgaccaagcagagaccgcgggggcgagactggttgtgctcgccactgctacccctccgggctccgtcaccgtgccccatcctaacatgaggaggttgctctgtccaccaccggagagatccctttttacggcaaggctattcccctcgaggtcatcaaggggggaaggcatctcatcttctgccactcaaagaaaaagtgtgacgagctcgccgcaaagctggtcgcatgggcatcaatgccgtggcctactaccgcggtcttgacgtgtctgtcatcccgaccagcggcgatgttgtcgttgtggcgaccgatgctctcatgactggctataccggcgacttcgactctgtgatgactgcaacacgtgtgtcacccagacagtcgatttcagccttgaccctaccttcaccattgagacaaccacgctcccccaagacgctgtctcccggactcaacgtcggggcaggaccggcagggggaagccaggcatctacgatttgtggcaccgggggaacgcccctccggcatgttcgactcgtccgtcatctgtgagtgctatgacgcgggctgtgcttggtatgagctcacgcccgccgagactacagttaggttacgagcgtaatgaacaccccggggctccccgtgtgccaggaccatcttgaattttgggagggcgtctttacgggcctcacccatatagatgcccactttctatcccagacaaagcagagtggagagaacttcccttacctggtagcgtacaagccaccgtgtgcgctagggctcaagcccctcccccatcgtgggaccagatgtggaagtgtttgatccgcctcaaacccaccctccatgggccaacacccctgctatacagactgggcgctgttcaaatgaagtcaccctgacgcacccagtcaccaaatacatcatgacatgcatgtcggctga

SEQ ID NO: 165 - DNA, 4869 bp, Hepatitis C virus
tcgcccacaggacgtcaagttcccgggtggcggtcagatcgttggtggagtttacttgttgccgcgcaggggccctagattgggtgtgcgcgcgacgaggaagacttccgagcggtcgcaacctcgagtagacgtcagcctatccccaaggcgcgtcggcccgagggcaggtcctgggctcagcccgggtacccttggcccctctatggcaatgagggttgcgggtgggcgggatggctcctgtctccccgtggtctcggcctagctggggccccacagacccccggcgtaggtcgcgcaatttgggtaaggtcatcgatacccttacgtgcggcttcgccgacctcatggggtacataccgctcgtcggcgcccctctcggaggcgctgccaggccctggcgcatggcgtcagggttctggaagacggcgtgaactatgcaacagggaatcttcctggttgctctttctctatcttccttctggctctgctctcttgcctgaccgtgcccgcttcagcctacaagtgcgcaactcttcggggctttaccatgtcaccaatgattgccctaactcgagtattgtgtacgaggcggccgatgccattctgcacactccggggtgtgtcccttgtgtttacgagggtaacacctcgaggtgttggtggcggtgacccccacagtggccaccagggacggcaaactccccacgatgcagcttcgacgccacatcgatctgcttgtcgggagtgccaccctctgctcggccctctacgtgggggatctgtgcggtctgtctttcttgtcggccaactgttcaccttctctcccaggcgccaccggacgatgcagaactgcaattgttctatctaccccggccatataacgggccaccgcatggcatgggatatgatgatgaactggtcccctacgtggcattggcggtagctcagctgctccggatcccacaagccatcatggacatgatcgctggtgctcactggggagtcctggcgggcatagcgtatttctccatggtggggaactgggcgaaggtcctgtagtgctgctgctatttgccggcgtcgacgcggagacccacgtcaccgggggagctgccggccgctccacggctgggattgctggtctcttcagcccaggcgccagacagaacatccaactgatcaataccaacggcagtggcacatcaatagcacggccctgaactgcaacgacagcctcaacaccggctggatagcagggctcttctattccaacaaattcaactcttcgggctgtcccgagaggttggccagctgccgacgcctgccgattttgcccagggctggggccccatcagttacgccaacggaagcggccccgacgaacgcccctactgctggcactaccccccaagaccttgtggtattgtgcccgctaagagcgtgtgtggcccggtgtattgcttcctcccagccccgtggtggtgggaacgaccgacaggtcgggcgcgcctacctacaactggggtgaaaatgacacggacgtcttcgtcctcaacaacaccaggccgccgctgggcaattggttcggttgacctggatgaactcaagtggattcaccaaagtgtgcggagcgcccccttgtgtcatcggaggggtgggcaacaacaccttgcgctgccccactgattgcttccgcaaacatccggaagccacatactctcggtgcggctccgtccttggatcacacccaggtgcatggtcgactacccatataggctttggcattatccttgtaccatcaactacaccttattcaaagtcaggatgtacgtgggaggggtcgagcacaggctggaagcgcctgcaactggacgcggggcgaacgctgtgatctggaagacagggacaggtccgagctcagtccgttactgctgtccaccacgcagtggcaggtccttccgtgttcttttacgaccctgccagccttgtccaccggcctctccacctccaccagaacattgtggacgtgcagtacttgtacggggtagggtcaagcatcgcgtcctgggccattaagtgggagtacgtcgttctcctgttccttctgcttgcagacgcgcgcgtctgtcctgcttgtggatgatgttactcatatcccaagcggaggcggctttggagaacctcgtagtactcaatgcagcatccctggccgggacgcacggtcttgtgtccttcctcgtgttcttctgctttgcgtggtatctgaaggtaggtgggcgcccggagcggtctacgccctctacgggatgtggcctctcctcctgctcctgctggcgctgcctcagcgggcatacgcactggacacggaggtggccgcgtcgtgtggcggcgttgtcttgtcgggttgatggcgctgactctgtcaccacattacaagcgcctcatctgctggtgcgtgtggtggcttcagtattttctaaccagagtggaagcgcacctgcacgtgtgggttccccccctcaacgtccgggggggggcgatgccatcatcttactcatgtgtgttatacacccggctctgatatttgacatcaccaaactgctgctggccgtcttcggacccctttggattcttcaagccagtttgctgaaagtcccctacttgtgcgcgttcaaggccttctccgaatctgcgcgctagcgcggaagttagccggaggtcattacgtgcagatggccatcatcaagttaggggcgcttactggcacctatgtctataaccatctcactcctctccgagactggcgcacaacggcctgcaagacctggccgtggctgtagaaccagtcatcttctcccgaatggagaccaaactcatcacgtggggggcagacactgccgcgtgcggcgacatcatcaacggcttgcccgttccgcccgcaggggccgggagatattgcttggaccagccgacggaatggcctctaaagggtggaggttgctggcgcccatcacagcgtacgcccagcagacgagaggcctcctagggtgcataatcaccagcctgactggcgggataaaaaccaagtggagggtgaggtccagatcgtgtcaactgctacccaaaccttcctggcaacgtgcatcaatggggtatgctggactgtctaccacggggccggaacgaggaccatcgcatccccaggggtcctgttatccagatgtacaccaatgtggaccaggaccttgtgggctggcctgctcctcaaggttcccgctcattgacaccctgcacctgcggctcctcggacctttacctggtcacgaggcacgccgatgtcttcccgtgcgccggcgaggtgatagcaggggcagcttgctctcgccccggcccatttcctacttgaaaggctcctcggggggtccgctgttgtgccccgcgggacacgccgtgggcatatttagggcgcggtgtgcacccgtggtgtggctaaggcggtggacttcatccctgtggagaacctagagacaaccatgagatccccggtgttcacggacaactcttctccaccagcagtgccccagagcttccaggtggctcacctgcatctcccactggcagcggcaagagcaccaaggtcccggctgcgtacgcagctcagggctacaaagtgctagtgctcaacccctctgttgctgcaacattgggctttggtgcttacatgtccaaggctcaggggtcgatcctaatgtcaggacgggggtgcgaacaattaccaccggcagccccatcacgtactccacctacggcaagttccttgccgacggcgggtgctcaggaggtgcttatgacataataatttgtgatgagtgccacccacggatgccacatccatcttgggcatcggcactgtccttgaccaagcagagaccgcgggggcgagactggttgtgctcgccactgctacccctccgggctccgtcaccgtgccccatcctaacatgaggaggttgctctgtccaccaccggagagatccctttttacggcaaggctattcccctcgaggtcatcaaggggggaaggcatctcatcttctgccactcaaagaaaaagtgtgacgagctcgccgcaaagctggtcgcatgggcatcaatgccgtggcctactaccgcggtcttgacgtgtctgtcatcccgaccagcggcgatgttgtcgtcgtggcgaccgatgctctcatgactggctataccggcgacttcgactctgtgatgactgcaacacgtgtgtcacccagacagtcgatttcagccttgaccctaccttcaccattgagacaaccacgctcccccaagacgctgtctcccggactcaacgtcggggcagaaccggcagggggaagccaggcatctacgatttgtggcaccgggggaacgcccctccgacatgttcgactcgtccgtcatctgtgagtgctatgacgcgggctgtgcttggtatgagctcacgcccgccgagactacagttaggctacgagcgtaatgaacaccccggggctccccgtgtgccaggaccatcttgaattttgggagggcgtctttacgggcctcacccatatagatgcccactttctatcccagacaaagcagagtggagagaacttcccttacctggtagcgtacaagccaccgtgtgcgctagggctcaagcccctcccccatcgtgggaccagatgtggaagtgtttgatccgcctcaaacccaccctccatgggccaacacccctgctatacagactgggcgctgttcaaatgaagtcaccctgacgcacccagtcaccaaatacatcatgacatgcatgtcggctga

SEQ ID NO: 166 - DNA, 4869 bp, Hepatitis C virus
tcgcccacaggacgtcaagttcccgggtggcggtcagatcgttggtggagtttacttgttgccgcgcaggggccctagattgggtgtgcgcgcgacgaggaagacttccgagcggtcgcaacctcgagtagacgtcagcctatccccaaggcgcgtcggcccgagggcaggtcctgggctcagcccgggtacccttggcccctctatggcaatgagggttgcgggtgggcgggatggctcctgtctccccgtggtctcggcctagctggggccccacagacccccggcgtaggtcgcgcaatttgggtaaggtcatcgatacccttacgtgcggcttcgccgacctcatggggtacataccgctcgtcggcgcccctctcggaggcgctgccaggccctggcgcatggcgtcagggttctggaagacggcgtgaactatgcaacagggaatcttcctggttgctctttctctatcttccttctggctctgctctcttgcctgaccgtgcccgcttcagcctacaagtgcgcaactcttcggggctttaccatgtcaccaatgattgccctaactcgagtattgtgtacgaggcggccgatgccattctgcacactccggggtgtgtcccttgtgtttacgagggtaacacctcgaggtgttggtggcggtgacccccacagtggccaccagggacggcaaactccccacgacgcagcttcgacgccacatcgatctgcttgtcgggagtgccaccctctgctcggccctctacgtgggggatctgtgcggtctgtctttcttgtcggccaactgttcaccttctctcccaggcgccaccggacgatgcagaactgcaattgttctatctaccccggccatataacgggccaccgcatggcatgggatatgatgatgaactggtcccctacgtggcattggcggtagctcagctgctccggatcccacaagccatcatggacatgatcgctggtgctcactggggagtcctggcgggcatagcgtatttctccatggtggggaactgggcgaaggtcctgtagtgctgctgctatttgccggcgtcgacgcggagacccacgtcaccgggggagctgccggccgctccacggctgggattgctggtctcttcagcccaggcgccagacagaacatccaactgatcaataccaacggcagtggcacatcaatagcacggccctgaactgcaacgacagcctcaacaccggctggatagcagggctcttctattccaacaaattcaactcttcgggctgtcccgagaggttggccagctgccgacgcctgccgattttgcccagggctggggccccatcagttacgccaacggaagcggccccgacgaacgcccctactgctggcactaccccccaagaccttgtggtattgtgcccgctaagagcgtgtgtggcccggtgtattgcttcctcccagccccgtggtggtgggaacgaccgacaggtcgggcgcgcctacctacaactggggtgaaaatgacacggacgtcttcgtcctcaacaacaccaggccgccgctgggcaattggttcggttgacctggatgaactcaagtggattcaccaaagtgtgcggagcgcccccttgtgtcatcggaggggtgggcaacaacaccttgcgctgccccactgattgcttccgcaaacatccggaagccacatactctcggtgcggctccgtccttggatcacacccaggtgcatggtcgactacccatataggctttggcattatccttgtaccatcaactacaccttattcaaagtcaggatgtacgtgggaggggtcgagcacaggctggaagcgcctgcaactggacgcggggcgaacgctgtgatctggaagacagggacaggtccgagctcagtccgttactgctgtccaccacgcagtggcaggtccttccgtgttcttttacgaccctgccagccttgtccaccggcctctccacctccaccagaacattgtggacgtgcagtacttgtacggggtagggtcaagcatcgcgtcctgggccattaagtgggagtacgtcgttctcctgttccttctgcttgcagacgcgcgcgtctgtcctgcttgtggatgatgttactcatatcccaagcggaggcggctttggagaacctcgtagtactcaatgcagcatccctggccgggacgcacggtcttgtgtccttcctcgtgttcttctgctttgcgtggtatctgaaggtaggtgggcgcccggagcggtctacgccctctacgggatgtggcctctcctcctgctcctgctggcgctgcctcagcgggcatacgcactggacacggaggtggccgcgtcgtgtggcggcgttgtcttatcgggttgatggcgctgactctgtcaccacattacaagcgcctcatctgctggtgcgtgtggtggcttcagtattttctaaccagagtggaagcgcacctgcacgtgtgggttccccccctcaacgtccgggggggggcgatgccatcatcttactcatgtgtgttatacacccggctctgatatttgacatcaccaaactgctgctggccgtcttcggacccctttggattcttcaagccagtttgctgaaagtcccctacttgtgcgcgttcaaggccttctccgaatctgcgcgctagcgcggaagttagccggaggtcattacgtgcagatggccatcatcaagttaggggcgcttactggcacctatgtctataaccatctcactcctctccgagactggcgcacaacggcctgcaagacctggccgtggctgtagaaccagtcatcttctcccgaatggagaccaaactcatcacgtggggggcagacaccgccgcgtgcggcgacatcatcaacggcttgcccgttccgcccgcaggggccgggagatattgcttggaccagccgacggaatggcctctaaagggtggaggttgctggcgcccatcacagcgtacgcccagcagacgagaggcctcctagggtgcataatcaccagcctgactggcgggataaaaaccaagtggagggtgaggtccagatcgtgtcaactgctacccaaaccttcctggcaacgtgcatcaatggggtatgctggactgtctaccacggggccggaacgaggaccatcgcatccccaggggtcctgttatccagatgtacaccaatgtggaccaggaccttgtgggctggcctgctcctcaaggttcccgctcattgacaccctgcacctgcggctcctcggacctttacctggtcacgaggcacgccgatgtcttcccgtgcgccggcgaggtgatagcaggggcagcttgctctcgccccggcccatttcctacttgaaaggctcctcggggggtccgctgttgtgccccgcgggacacgccgtgggcatatttagggcgcggtgtgcacccgtggtgtggctaaggcggtggacttcatccctgtggagaacctagagacaaccatgagatccccggtgttcacggacaactcttctccaccagcagtgccccagagcttccaggtggctcacctgcatctcccactggcagcggcaagagcaccaaggtcccggctgcgtacgcagctcagggctacaaagtgctagtgctcaacccctctgttgctgcaacattgggctttggtgcttacatgtccaaggctcaggggtcgatcctaatgtcaggacgggggtgcgaacaattaccaccggcagccccatcacgtactccacctacggcaagttccttgccgacggcgggtgctcaggaggtgcttatgacataataatttgtgatgagtgccacccacggatgccacatccatcttgggcatcggcactgtccttgaccaagcagagaccgcgggggcgagactggttgtgctcgccactgctacccctccgggctccgtcaccgtgccccatcctaacatgaggaggttgctctgtccaccaccggagagatccctttttacggcaaggctattcccctcgaggtcatcaaggggggaaggcatctcatcttctgccactcaaagaaaaagtgtgacgagctcgccgcaaagctggtcgcatgggcatcaatgccgtggcctactaccgcggtcttgacgtgtctgtcatcccgaccagcggcgatgttgtcgtcgtggcgaccgatgctctcatgactggctataccggcgacttcgactctgtgatgactgcaacacgtgtgtcacccagacagtcgatttcagccttgaccctaccttcaccattgagacaaccacgctcccccaagacgctgtctcccggactcaacgtcggggcagaaccggcagggggaagccaggcatctacgatttgtggcaccgggggaacgcccctccggcatgttcgactcgtccgtcatctgtgagtgctatgacgcgggctgtgcttggtatgagctcacgcccgccgagactacagttaggctacgagcgtaatgaacaccccggggctccccgtgtgccaggaccatcttgaattttgggagggcgtctttacgggcctcacccatatagatgcccactttctatcccagacaaagcagagtggagagaacttcccttacctggtagcgtacaagccaccgtgtgcgctagggctcaagcccctcccccatcgtgggaccagatgtggaagtgtttgatccgcctcaaacccaccctccatgggccaacacccctgctatacagactgggcgctgttcaaatgaagtcaccctgacgcacccagtcaccaaatacatcatgacatgcatgtcggctga

SEQ ID NO: 167 - DNA, 4869 bp, Hepatitis C virus
tcgcccacaggacgtcaagttcccgggtggcggtcagatcgttggtggagtttacttgttgccgcgcaggggccctagattgggtgtgcgcgcgacgaggaagacttccgagcggtcgcaacctcgagtagacgtcagcctatccccaaggcgcgtcggcccgagggcaggtcctgggctcagcccgggtacccttggcccctctatggcaatgagggttgcgggtgggcgggatggctcctgtctccccgtggtctcggcctagctggggccccacagacccccggcgtaggtcgcgcaatttgggtaaggtcatcgatacccttacgtgcggcttcgccgacctcatggggtacataccgctcgtcggcgcccctctcggaggcgctgccaggccctggcgcatggcgtcagggttctggaagacggcgtgaactatgcaacagggaatcttcctggttgctctttctctatcttccttctggctctgctctcttgcctgaccgtgcccgcttcagcctacaagtgcgcaactcttcggggctttaccatgtcaccaatgattgccctaactcgagtattgtgtacgaggcggccgatgccattctgcacactccggggtgtgtcccttgtgtttacgagggtaacacctcgaggtgttggtggcggtgacccccacagtggccaccagggacggcaaactccccacgacgcagcttcgacgccacatcgatctgcttgtcgggagtgccaccctctgctcggccctctacgtgggggatctgtgcggtctgtctttcttgtcggccaactgttcaccttctctcccaggcgccaccggacgatgcagaactgcaattgttctatctaccccggccatataacgggccaccgcatggcatgggatatgatgatgaactggtcccctacgtggcattggcggtagctcagctgctccggatcccacaagccatcatggacatgatcgctggtgctcactggggagtcctggcgggcatagcgtatttctccatggtggggaactgggcgaaggtcctgtagtgctgctgctatttgccggcgtcgacgcggagacccacgtcaccgggggagctgccggccgctccacggctgggattgctggtctcttcagcccaggcgccagacagaacatccaactgatcaataccaacggcagtggcacatcaatagcacggccctgaactgcaacgacagcctcaacaccggctggatagcagggctcttctattccaacaaactcaactcttcgggctgtcccgagaggttggccagctgccgacgcctgccgattttgcccagggctggggccccatcagttacgccaacggaagcggccccgacgaacgcccctactgctggcactaccccccaagaccttgtggtattgtgcccgctaagagcgtgtgtggcccggtgtattgcttcctcccagccccgtggtggtgggaacgaccgacaggtcgggcgcgcctacctacaactggggtgaaaatgacacggacgtcttcgtcctcaacaacaccaggccgccgctgggcaattggttcggttgacctggatgaactcaagtggattcaccaaagtgtgcggagcgcccccttgtgtcatcggaggggtgggcaacaacaccttgcgctgccccactgattgcttccgcaaacatccggaagccacatactctcggtgcggctccgtccttggatcacacccaggtgcatggtcgactacccatataggctttggcattatccttgtaccatcaactacaccttattcaaagtcaggatgtacgtgggaggggtcgagcacaggctggaagcgcctgcaactggacgcggggcgaacgctgtgatctggaagacagggacaggtccgagctcagtccgttactgctgtccaccacgcagtggcaggtccttccgtgttcttttacgaccctgccagccttgtccaccggcctctccacctccaccagaacattgtggacgtgcagtacttgtacggggtagggtcaagcatcgcgtcctgggccattaagtgggagtacgtcgttctcctgttccttctgcttgcagacgcgcgcgtctgtcctgcttgtggatgatgttactcatatcccaagcggaggcggctttggagaacctcgtagtactcaatgcagcatccctggccgggacgcacggtcttgtgtccttcctcgtgttcttctgctttgcgtggtatctgaaggtaggtgggcgcccggagcggtctacgccctctacgggatgtggcctctcctcctgctcctgctggcgctgcctcagcgggcatacgcactggacacggaggtggccgcgtcgtgtggcggcgttgtcttgtcgggttgatggcgctgactctgtcaccacattacaagcgcctcatctgctggtgcgtgtggtggcttcagtattttctaaccagagtggaagcgcacctgcacgtgtgggttccccccctcaacgtccgggggggggcgatgccatcatcttactcatgtgtgttatacacccggctctgatatttgacatcaccaaactgctgctggccgtcttcggacccctttggattcttcaagccagtttgctgaaagtcccctacttgtgcgcgttcaaggccttctccgaatctgcgcgctagcgcggaagttagccggaggtcattacgtgcagatggccatcatcaagttaggggcgcttactggcacctatgtctataaccatctcactcctctccgagactggcgcacaacggcctgcaagacctggccgtggctgtagaaccagtcatcttctcccgaatggagaccaaactcatcacgtggggggcagacaccgccgcgtgcggcgacatcatcaacggcttgcccgttccgcccgcaggggccgggagatattgcttggaccagccgacggaatggcctctaaagggtggaggttgctggcgcccatcacagcgtacgcccagcagacgagaggcctcctagggtgcataatcaccagcctgactggcgggataaaaaccaagtggagggtgaggtccagatcgtgtcaactgctacccaaaccttcctggcaacgtgcatcaatggggtatgctggactgtctaccacggggccggaacgaggaccatcgcatccccaggggtcctgttatccagatgtacaccaatgtggaccaggaccttgtgggctggcctgctcctcaaggttcccgctcattgacaccctgcacctgcggctcctcggacctttacctggtcacgaggcacgccgatgtcttcccgtgcgccggcgaggtgatagcaggggcagcttgctctcgccccggcccatttcctacttgaaaggctcctcggggggtccgctgttgtgccccgcgggacacgccgtgggcatatttagggcgcggtgtgcacccgtggtgtggctaaggcggtggacttcatccctgtggagaacctagagacaaccatgagatccccggtgttcacggacaactcttctccaccagcagtgccccagagcttccaggtggctcacctgcatctcccactggcagcggcaagagcaccaaggtcccggctgcgtacgcagctcagggctacaaagtgctagtgctcaacccctctgttgctgcaacattgggctttggtgcttacatgtccaaggctcaggggtcgatcctaatgtcaggacgggggtgcgaacaattaccaccggcagccccatcacgtactccacctacggcaagttccttgccgacggcgggtgctcaggaggtgcttatgacataataatttgtgatgagtgccacccacggatgccacatccatcttgggcatcggcactgtccttgaccaagcagagaccgcgggggcgagactggttgtgctcgccactgctacccctccgggctccgtcaccgtgccccatcctaacatgaggaggttgctctgtccaccaccggagagatccctttttacggcaaggctattcccctcgaggtcatcaaggggggaaggcatctcatcttctgccactcaaagaaaaagtgtgacgagctcgccgcaaagctggtcgcatgggcatcaatgccgtggcctactaccgcggtcttgacgtgtctgtcatcccgaccagcggcgatgttgtcgtcgtggcgaccgatgctctcatgactggctataccggcgacttcgactctgtgatgactgcaacacgtgtgtcacccagacagtcgacttcagccttgaccctaccttcaccattgagacaaccacgctcccccaagacgctgtctcccggactcaacgtcggggcagaaccggcagggggaagccaggcatctacgatttgtggcaccgggggaacgcccctccggcatgttcgactcgtccgtcatctgtgagtgctatgacgcgggctgtgcttggtatgagctcacgcccgccgagactacagttaggctacgagcgtaatgaacaccccggggctccccgtgtgccaggaccatcttgaattttgggagggcgtctttacgggcctcacccatatagatgcccactttctatcccagacaaagcagagtggagagaacttcccttacctggtagcgtacaagccaccgtgtgcgctagggctcaagcccctcccccatcgtgggaccagatgtggaagtgtttgatccgcctcaaacccaccctccatgggccaacacccctgctatacagactgggcgctgttcaaatgaagtcaccctgacgcacccagtcaccaaatacatcatgacatgcatgtcggctga

SEQ ID NO: 168 - DNA, 4869 bp, Hepatitis C virus; identical to SEQ ID NO: 96

SEQ ID NO: 169 - DNA, 4869 bp, Hepatitis C virus; identical to SEQ ID NO: 96

SEQ ID NO: 170 - DNA, 4869 bp, Hepatitis C virus; identical to SEQ ID NO: 96

SEQ ID NO: 171 - DNA, 4869 bp, Hepatitis C virus; identical to SEQ ID NO: 96

SEQ ID NO: 172 - DNA, 4869 bp, Hepatitis C virus; identical to SEQ ID NO: 96

SEQ ID NO: 173 - DNA, 4869 bp, Hepatitis C virus
tcgcccacaggacgtcaagttcccgggtggcggtcagatcgttggtggagtttacttgttgccgcgcaggggccctagattgggtgtgcgcgcgacgaggaagacttccgagcggtcgcaacctcgagtagacgtcagcctatccccaaggcgcgtcggcccgagggcaggtcctgggctcagcccgggtacccttggcccctctatggcaatgagggttgcgggtgggcgggatggctcctgtctccccgtggtctcggcctagctggggccccacagacccccggcgtaggtcgcgcaatttgggtaaggtcatcgatacccttacgtgcggcttcgccgacctcatggggtacataccgctcgtcggcgcccctctcggaggcgctgccaggccctggcgcatggcgtcagggttctggaagacggcgtgaactatgcaacagggaatcttcctggttgctctttctctatcttccttctggctctgctctcttgcctgaccgtgcccgcttcagcctacaagtgcgcaactcttcggggctttaccatgtcaccaatgattgccctaactcgagtattgtgtacgaggcggccgatgccattctgcacactccggggtgtgtcccttgtgtttacgagggtaacacctcgaggtgttggtggcggtgacccccacagtggccaccagggacggcaaactccccacgacgcagcttcgacgccacatcgatctgcttgtcgggagtgccaccctctgctcggccctctacgtgggggatctgtgcggtctgtctttcttgtcggccaactgttcaccttctctcccaggcgccaccggacgatgcagaactgcaattgttctatctaccccggccatataacgggccaccgcatggcatgggatatgatgatgaactggtcccctacgtggcattggcggtagctcagctgctccggatcccacaagccatcatggacatgatcgctggtgctcactggggagtcctggcgggcatagcgtatttctccatggtggggaactgggcgaaggtcctgtagtgctgctgctatttgccggcgtcgacgcggagacccacgtcaccgggggagctgccggccgctccacggctgggattgctggtctcttcagcccaggcgccagacagaacatccaactgatcaataccaacggcagtggcacatcaatagcacggccctgaactgcaacgacagcctcaacaccggctggatagcagggctcttctattccaacaaattcaactcttcgggctgtcccgagaggttggccagctgccgacgcctgccgattttgcccagggctggggccccatcagttacgccaacggaagcgaccccgacgaacgcccctactgctggcactaccccccaagaccttgtggtattgtgcccgctaagagcgtgtgtggcccggtgtattgcttcctcccagccccgtggtggtgggaacgaccgacaggtcgggcgcgcctacctacaactggggtgaaaatgacacggacgtcttcgtcctcaacaacaccaggccgccgctgggcaattggttcggttgacctggatgaactcaagtggattcaccaaagtgtgcggagcgcccccttgtgtcatcggaggggtgggcaacaacaccttgcgctgccccactgattgcttccgcaaacatccggaagccacatactctcggtgcggctccgtccttggatcacacccaggtgcatggtcgactacccatataggctttggcattatccttgtaccatcaactacaccttattcaaagtcaggatgtacgtgggaggggtcgagcacaggctggaagcgcctgcaactggacgcggggcgaacgctgtgatctggaagacagggacaggtccgagctcagtccgttactgctgtccaccacgcagtggcaggtccttccgtgttcttttacgaccctgccagccttgtccaccggcctctccacctccaccagaacattgtggacgtgcagtacttgtacggggtagggtcaagcatcgcgtcctgggccattaagtgggagtacgtcgttctcctgttccttctgcttgcagacgcgcgcgtctgtcctgcttgtggatgatgttactcatatcccaagcggaggcggctttggagaacctcgtagtactcaatgcagcatccctggccgggacgcacggtcttgtgtccttcctcgtgttcttctgctttgcgtggtatctgaaggtaggtgggcgcccggagcggtctacgccctctacgggatgtggcctctcctcctgctcctgctggcgctgcctcagcgggcatacgcactggacacggaggtggccgcgtcgtgtggcggcgttgtcttgtcgggttgatggcgctgactctgtcaccacattacaagcgcctcatctgctggtgcgtgtggtggcttcagtattttctaaccagagtggaagcgcacctgcacgtgtgggttccccccctcaacgtccgggggggggcgatgccatcatcttactcatgtgtgttatacacccggctctgatatttgacatcaccaaactgctgctggccgtcttcggacccctttggattcttcaagccagtttgctgaaagtcccctacttgtgcgcgttcaaggccttctccgaatctgcgcgctagcgcggaagttagccggaggtcattacgtgcagatggccatcatcaagttaggggcgcttactggcacctatgtctataaccatctcactcctctccgagactggcgcacaacggcctgcaagacctggccgtggctgtagaaccagtcatcttctcccgaatggagaccaaactcatcacgtggggggcagacaccgccgcgtgcggcgacatcatcaacggcttgcccgttccgcccgcaggggccgggagatattgcttggaccagccgacggaatggcctctaaagggtggaggttgctggcgcccatcacagcgtacgcccagcagacgagaggcctcctagggtgcataatcaccagcctgactggcgggataaaaaccaagtggagggtgaggtccagatcgtgtcaactgctacccaaaccttcctggcaacgtgcatcaatggggtatgctggactgtctaccacggggccggaacgaggaccatcgcatccccaggggtcctgttatccagatgtacaccaatgtggaccaggaccttgtgggctggcctgctcctcaaggttcccgctcattgacaccctgcacctgcggctcctcggacctttacctggtcacgaggcacgccgatgtcttcccgtgcgccggcgaggtgatagcaggggcagcttgctctcgccccggcccatttcctacttgaaaggctcctcggggggtccgctgttgtgccccgcgggacacgccgtgggcatatttagggcgcggtgtgcacccgtggtgtggctaaggcggtggacttcatccctgtggagaacctagagacaaccatgagatccccggtgttcacggacaactcttctccaccagcagtgccccagagcttccaggtggctcacctgcatctcccactggcagcggcaagagcaccaaggtcccggctgcgtacgcagctcagggctacaaagtgctagtgctcaacccctctgttgctgcaacattgggctttggtgcttacatgtccaaggctcaggggtcgatcctaatgtcaggacgggggtgcgaacaattaccaccggcagccccatcacgtactccacctacggcaagttccttgccgacggcgggtgctcaggaggtgcttatgacataataatttgtgatgagtgccacccacggatgccacatccatcttgggcatcggcactgtccttgaccaagcagagaccgcgggggcgagactggttgtgctcgccactgctacccctccgggctccgtcaccgtgccccatcctaacatgaggaggttgctctgtccaccaccggagagatccctttttacggcaaggctattcccctcgaggtcatcaaggggggaaggcatctcatcttctgccactcaaagaaaaagtgtgacgagctcgccgcaaagctggtcgcatgggcatcaatgccgtggcctactaccgcggtcttgacgtgtctgtcatcccgaccagcggcgatgttgtcgtcgtggcgaccgatgctctcatgactggctataccggcgacttcgactctgtgatgactgcaacacgtgtgtcacccagacagtcgatttcagccttgaccctaccttcaccattgagacaaccacgctcccccaagacgctgtctcccggactcaacgtcggggcagaaccggcagggggaagccaggcatctacgatttgtggcaccgggggaacgcccctccggcatgttcgactcgtccgtcatctgtgagtgctatgacgcgggctgtgcttggtatgagctcacgcccgccgagactacagttaggctacgagcgtaatgaacaccccggggctccccgtgtgccaggaccatcttgaattttgggagggcgtctttacgggcctcacccatatagatgcccactttctatcccagacaaagcagagtggagagaacttcccttacctggtagcgtacaagccaccgtgtgcgctagggctcaagcccctcccccatcgtgggaccagatgtggaagtgtttgatccgcctcaaacccaccctccatgggccaacacccctgctatacagactgggcgctgttcaaatgaagtcaccctgacgcacccagtcaccaaatacatcatgacatgcatgtcggctga

SEQ ID NO: 174 - DNA, 4869 bp, Hepatitis C virus
tcgcccacaggacgtcaagttcccgggtggcggtcagatcgttggtggagtttacttgttgccgcgcaggggccctagattgggtgtgcgcgcgacgaggaagacttccgagcggtcgcaacctcgagtagacgtcagcctatccccaaggcgcgtcggcccgagggcaggtcctgggctcagcccgggtacccttggcccctctatggcaatgagggttgcgggtgggcgggatggctcctgtctccccgtggtcccggcctagctggggccccacagacccccggcgtaggtcgcgcaatttgggtaaggtcatcgatacccttacgtgcggcttcgccgacctcatggggtacataccgctcgtcggcgcccctctcggaggcgctgccaggccctggcgcatggcgtcagggttctggaagacggcgtgaactatgcaacagggaatcttcctggttgctctttctctatcttccttctggctctgctctcttgcctgaccgtgcccgcttcagcctacaagtgcgcaactcttcggggctttaccatgtcaccaatgattgccctaactcgagtattgtgtacgaggcggccgatgccattctgcacactccggggtgtgtcccttgtgtttacgagggtaacacctcgaggtgttggtggcggtgacccccacagtggccaccagggacggcaaactccccacgacgcagcttcgacgccacatcgatctgcttgtcgggagtgccaccctctgctcggccctctacgtgggggatctgtgcggtctgtctttcttgtcggccaactgttcaccttctctcccaggcgccaccggacgatgcagaactgcaattgttctatctaccccggccatataacgggccaccgcatggcatgggatatgatgatgaactggtcccctacgtggcattggcggtagctcagctgctccggatcccacaagccatcatggacatgatcgctggtgctcactggggagtcctggcgggcatagcgtatttctccatggtggggaactgggcgaaggtcctgtagtgctgctgctatttgccggcgtcgacgcggagacccacgtcaccgggggagctgccggccgctccacggctgggattgctggtctcttcagcccaggcgccagacagaacatccaactgatcaataccaacggcagtggcacatcaatagcacggccctgaactgcaacgacagcctcaacaccggctggatagcagggctcttctattccaacaaattcaactcttcgggctgtcccgagaggttggccagctgccgacgcctgccgattttgcccagggctggggccccatcagttacgccaacggaagcggccccgacgaacgcccctactgctggcactaccccccaagaccttgtggtattgtgcccgctaagagcgtgtgtggcccggtgtattgcttcctcccagccccgtggtggtgggaacgaccgacaggtcgggcgcgcctacctacaactggggtgaaaatgacacggacgtcttcgtcctcaacaacaccaggccgccgctgggcaattggttcggttgacctggatgaactcaagtggattcaccaaagtgtgcggagcgcccccttgtgtcatcggaggggtgggcaacaacaccttgcgctgccccactgattgcttccgcaaacatccggaagccacatactctcggtgcggctccgtccttggatcacacccaggtgcatggtcgactacccatataggctttggcattatccttgtaccatcaactacaccttattcaaagtcaggatgtacgtgggaggggtcgagcacaggctggaagcgcctgcaactggacgcggggcgaacgccgtgatctggaagacagggacaggtccgagctcagtccgttactgctgtccaccacgcagtggcaggtccttccgtgttcttttacgaccctgccagccttgtccaccggcctctccacctccaccagaacattgtggacgtgcagtacttgtacggggtagggtcaagcatcgcgtcctgggccattaagtgggagtacgtcgttctcctgttccttctgcttgcagacgcgcgcgtctgtcctgcttgtggatgatgttactcatatcccaagcggaggcggctttggagaacctcgtagtactcaatgcagcatccctggccgggacgcacggtcttgtgtccttcctcgtgttcttctgctttgcgtggtatctgaaggtaggtgggcgcccggagcggtctacgccctctacgggatgtggcctctcctcctgctcctgctggcgctgcctcagcgggcatacgcactggacacggaggtggccgcgtcgtgtggcggcgttgtcttgtcgggttgatggcgctgactctgtcaccacattacaagcgcctcatctgctggtgcgtgtggtggcttcagtattttctaaccagagtggaagcgcacctgcacgtgtgggttccccccctcaacgtccgggggggggcgatgccatcatcttactcatgtgtgttatacacccggctctgatatttgacatcaccaaactgctgctggccgtcttcggacccctttggattcttcaagccagtttgctgaaagtcccctacttgtgcgcgttcaaggccttctccgaatctgcgcgctagcgcggaagttagccggaggtcattacgtgcagatggccatcatcaagttaggggcgcttactggcacctatgtctataaccatctcactcctctccgagactggcgcacaacggcctgcaagacctggccgtggctgtagaaccagtcatcttctcccgaatggagaccaaactcatcacgtggggggcagacaccgccgcgtgcggcgacatcatcaacggcttgcccgttccgcccgcaggggccgggagatattgcttggaccagccgacggaatggcctctaaagggtggaggttgctggcgcccatcacagcgtacgcccagcagacgagaggcctcctagggtgcataatcaccagcctgactggcgggataaaaaccaagtggagggtgaggtccagatcgtgtcaactgctacccaaaccttcctggcaacgtgcatcaatggggtatgctggactgtctaccacggggccggaacgaggaccatcgcatccccaggggtcctgttatccagatgtacaccaatgtggaccaggaccttgtgggctggcctgctcctcaaggttcccgctcattgacaccctgcacctgcggctcctcggacctttacctggtcacgaggcacgccgatgtcttcccgtgcgccggcgaggtgatagcaggggcagcttgctctcgccccggcccatttcctacttgaaaggctcctcggggggtccgctgttgtgccccgcgggacacgccgtgggcatatttagggcgcggtgtgcacccgtggtgtggctaaggcggtggacttcatccctgtggagaacctagagacaaccatgagatccccggtgttcacggacaactcttctccaccagcagtgccccagagcttccaggtggctcacctgcatctcccactggcagcggcaagagcaccaaggtcccggctgcgtacgcagctcagggctacaaagtgctagtgctcaacccctctgttgctgcaacattgggctttggtgcttacatgtccaaggctcaggggtcgatcctaatgtcaggacgggggtgcgaacaattaccaccggcagccccatcacgtactccacctacggcaagttccttgccgacggcgggtgctcaggaggtgcttatgacataataatttgtgatgagtgccacccacggatgccacatccatcttgggcatcggcactgtccttgaccaagcagagaccgcgggggcgagactggttgtgctcgccactgctacccctccgggctccgtcaccgtgccccatcctaacatgaggaggttgctctgtccaccaccggagagatccctttttacggcaaggctattcccctcgaggtcatcaaggggggaaggcatctcatcttctgccactcaaagaaaaagtgtgacgagctcgccgcaaagctggtcgcatgggcatcaatgccgtggcctactaccgcggtcttgacgtgtctgtcatcccgaccagcggcgatgttgtcgtcgtggcgaccgatgctctcatgactggctataccggcgacttcgactctgtgatgactgcaacacgtgtgtcacccagacagtcgatttcagccttgaccctaccttcaccattgagacaaccacgctcccccaagacgctgtctcccggactcaacgtcggggcagaaccggcagggggaagccaggcatctacgatttgtggcaccgggggaacgcccctccggcatgttcgactcgtccgtcatctgtgagtgctatgacgcgggctgtgcttggtatgagctcacgcccgccgagactacagttaggctacgagcgtaatgaacaccccggggctccccgtgtgccaggaccatcttgaattttgggagggcgtctttacgggcctcacccatatagatgcccactttctatcccagacaaagcagagtggagagaacttcccttacctggtagcgtacaagccaccgtgtgcgctagggctcaagcccctcccccatcgtgggaccagatgtggaagtgtttgatccgcctcaaacccaccctccatgggccaacacccctgctatacagactgggcgctgttcaaatgaagtcaccctgacgcacccagtcaccaaatacatcatgacatgcatgtcggctga

SEQ ID NO: 175 - DNA, 4869 bp, Hepatitis C virus
tcgcccacaggacgtcaagttcccgggtggcggtcagatcgttggtggagtttacttgttgccgcgcaggggccctagattgggtgtgcgcgcgacgaggaagacttccgagcggtcgcaacctcgagtagacgtcagcctatccccaaggcgcgtcggcccgagggcaggtcctgggctcagcccgggtacccttggcccctctatggcaatgagggttgcgggtgggcgggatggctcctgtctccccgtggtctcggcctagctggggccccacagacccccggcgtaggtcgcgcaatttgggtaaggtcatcgatacccttacgtgcggcttcgccgacctcatggggtacataccgctcgtcggcgcccctctcggaggcgctgccaggccctggcgcatggcgtcagggttctggaagacggcgtgaactatgcaacagggaatcttcctggttgctctttctctatcttccttctggctctgctctcttgcctgaccgtgcccgcttcagcctacaagtgcgcaactcttcggggctttaccatgtcaccaatgattgccctaactcgagtattgtgtacgaggcggccgatgccattctgcacactccggggtgtgtcccttgtgtttacgagggtaacacctcgaggtgttggtggcggtgacccccacagtggccaccagggacggcaaactccccacgacgcagcttcgacgccacatcgatctgcttgtcgggagtgccaccctctgctcggccctctacgtgggggatctgtgcggtctgtctttcttgtcggccaactgttcaccttctctcccaggcgccaccggacgatgcagaactgcaattgttctatctaccccggccatataacgggccaccgcatggcatgggatatgatgatgaactggtcccctacgtggcattggcggtagctcagctgctccggatcccacaagccatcatggacatgatcgctggtgctcactggggagtcctggcgggcatagcgtatttctccatggtggggaactgggcgaaggtcctgtagtgctgctgctatttgccggcgtcgacgcggagacccacgtcaccgggggagctgccggccgctccacggctgggattgctggtctcttcagcccaggcgccagacagaacatccaactgatcaataccaacggcagtggcacatcaatagcacggccctgaactgcaacgacagcctcaacaccggctggatagcagggctcttctattccaacaaattcaactcttcgggctgtcccgagaggttggccagctgccgacgcctgccgattttgcccagggctggggccccatcagttacgccaacggaagcggccccgacgaacgcccctactgctggcactaccccccaagaccttgtggtattgtgcccgctaagagcgtgtgtggcccggtgtattgcttcctcccagccccgtggtggtgggaacgaccgacaggtcgggcgcgcctacctacaactggggtgaaaatgacacggacgtcttcgtcctcaacaacaccaggccgccgctgggcaattggttcggttgacctggatgaactcaagtggattcaccaaagtgtgcggagcgcccccttgtgtcatcggaggggtgggcaacaacaccttgcgctgccccactgattgcttccgcaaacatccggaagccacatactctcggtgcggctccgtccttggatcacacccaggtgcatggtcgactacccatataggctttggcattatccttgtaccatcaactacaccttattcaaagtcaggatgtacgtgggaggggtcgagcacaggctggaagcgcctgcaactggacgcggggcgaacgctgtgatctggaagacagggacaggtccgagctcagtccgttactgctgtccaccacgcagtggcaggtccttccgtgttcttttacgaccctgccagccttgtccaccggcctctccacctccaccagaacattgtggacgtgcagtacttgtacggggtagggtcaagcatcgcgtcctgggccattaagtgggagtacgtcgttctcctgttccttctgcttgcagacgcgcgcgtctgtcctgcttgtggatgatgttactcatatcccaagcggaggcggctttggagaacctcgtagtactcaatgcagcatccctggccgggacgcacggtcttgtgtccttcctcgtgttcttctgctttgcgtggtatctgaaggtaggtgggcgcccggagcggtctacgccctctacgggatgtggcctctcctcctgctcctgctggcgctgcctcagcgggcatacgcactggacacggaggtggccgcgtcgtgtggcggcgttgtcttgtcgggttgatggcgctgactctgtcaccacattacaagcgcctcatctgctggtgcgtgtggtggcttcagtattttctaaccagagtggaagcgcacctgcacgtgtgggttccccccctcaacgtccgggggggggcgatgccatcatcttactcatgtgtgttatacacccggctctgatatttgacatcaccaaactgctgctggccgtcttcggacccctttggattcttcaagccagtttgctgaaagtcccctacttgtgcgcgttcaaggccttctccgaatctgcgcgctagcgcggaagttagccggaggtcattacgtgcagatggccatcatcaagttaggggcgcttactggcacctatgtctataaccatctcactcctctccgagactggcgcacaacggcctgcaagacctggccgtggctgtagaaccagtcatcttctcccgaatggagaccaaactcatcacgtggggggcagacaccgccgcgtgcggcgacatcatcaacggcttgcccgttccgcccgcaggggccgggagatattgcttggaccagccgacggaatggcctctaaagggtggaggttgctggcgcccatcacagcgtacgcccagcagacgagaggcctcctagggtgcataatcaccagcctgactggcgggataaaaaccaagtggagggtgaggtccagatcgtgtcaactgctacccaaaccttcctggcaacgtgcatcaatggggtatgctggactgtctaccacggggccggaacgaggaccatcgcatccccaggggtcctgttatccagatgtacaccaatgtggaccaggacctcgtgggctggcctgctcctcaaggttcccgctcattgacaccctgcacctgcggctcctcggacctttacctggtcacgaggcacgccgatgtcttcccgtgcgccggcgaggtgatagcaggggcagcttgctctcgccccggcccatttcctacttgaaaggctcctcggggggtccgctgttgtgccccgcgggacacgccgtgggcatatttagggcgcggtgtgcacccgtggtgtggctaaggcggtggacttcatccctgtggagaacctagagacaaccatgagatccccggtgttcacggacaactcttctccaccagcagtgccccagagcttccaggtggctcacctgcatctcccactggcagcggcaagagcaccaaggtcccggctgcgtacgcagctcagggctacaaagtgctagtgctcaacccctctgttgctgcaacattgggctttggtgcttacatgtccaaggctcaggggtcgatcctaatgtcaggacgggggtgcgaacaattaccaccggcagccccatcacgtactccacctacggcaagttccttgccgacggcgggtgctcaggaggtgcttatgacataataatttgtgatgagtgccacccacggatgccacatccatcttgggcatcggcactgtccttgaccaagcagagaccgcgggggcgagactggttgtgctcgccactgctacccctccgggctccgtcaccgtgccccatcctaacatgaggaggttgctctgtccaccaccggagagatccctttttacggcaaggctattcccctcgaggtcatcaaggggggaaggcatctcatcttctgccactcaaagaaaaagtgtgacgagctcgccgcaaagctggtcgcatgggcatcaatgccgtggcctactaccgcggtcttgacgtgtctgtcatcccgaccagcggcgatgttgtcgtcgtggcgaccgatgctctcatgactggctataccggcgacttcgactctgtgatgactgcaacacgtgtgtcatccagacagtcgatttcagccttgaccctaccttcaccattgagacaaccacgctcccccaagacgctgtctcccggactcaacgtcggggcagaaccggcagggggaagccaggcatctacgatttgtggcaccgggggaacgcccctccggcatgttcgactcgtccgtcatctgtgagtgctatgacgcgggctgtgcttggtatgagctcacgcccgccgagactacagttaggctacgagcgtaatgaacaccccggggctccccgtgtgccaggaccatcttgaattttgggagggcgtctttacgggcctcacccatatagatgcccactttctatcccagacaaagcagagtggagagaacttcccttacctggtagcgtacaagccaccgtgtgcgctagggctcaagcccctcccccatcgtgggaccagatgtggaagtgtttgatccgcctcaaacccaccctccatgggccaacacccctgctatacagactgggcgctgttcaaatgaagtcaccctgacgcacccagtcaccaaatacatcatgacatgcatgtcggctga

SEQ ID NO: 176 - DNA, 4869 bp, Hepatitis C virus
tcgcccacaggacgtcaagttcccgggtggcggtcagatcgttggtggagtttacttgttgccgcgcaggggccctagattgggtgtgcgcgcgacgaggaagacttccgagcggtcgcaacctcgagtagacgtcagcctatccccaaggcgcgtcggcccgagggcaggtcctgggctcagcccgggtacccttggcccctctatggcaatgagggttgcgggtgggcgggatggctcctgtctccccgtggtctcggcctagctggggccccacagacccccggcgtaggtcgcgcaatttgggtaaggtcatcgatacccttacgtgcggcttcgccgacctcatggggtacataccgctcgtcggcgcccctctcggaggcgctgccaggccctggcgcatggcgtcagggttctggaagacggcgtgaactatgcaacagggaatcttcctggttgctctttctctatcttccttctggctctgctctcttgcctgaccgtgcccgcttcagcctacaagtgcgcaactcttcggggctttaccatgtcaccaatgattgccctaactcgagtattgtgtacgaggcggccgatgccattctgcacactccggggtgtgtcccttgtgtttacgagggtaacacctcgaggtgttggtggcggtgacccccacagtggccaccagggacggcaaactccccacgacgcagcttcgacgccacatcgatctgcttgtcgggagtgccaccctctgctcggccctctacgtgggggatctgtgcggtctgtctttcttgtcggccaactgttcaccttctctcccaggcgccaccggacgatgcagaactgcaattgttctatctaccccggccatataacgggccaccgcatggcatgggatatgatgatgaactggtcccctacgtggcattggcggtagctcagctgctccggatcccacaagccatcatggacatgatcgctggtgctcactggggagtcctggcgggcatagcgtatttctccatggtggggaactgggcgaaggtcctgtagtgctgctgctatttgccggcgtcgacgcggagacccacgtcaccgggggagctgccggccgctccacggctgggattgctggtctcttcagcccaggcgccagacagaacatccaactgatcaataccaacggcagtggcacatcaatagcacggccctgaactgcaacgacagcctcaacaccggctggatagcagggctcttctattccaacaaattcaactcttcgggctgtcccgagaggttggccagctgccgacgcctgccgattttgcccagggctggggccccatcagttacgccaacggaagcggccccgacgaacgcccctactgctggcactaccccccaagaccttgtggtattgtgcccgctaagagcgtgtgtggcccggtgtattgcttcctcccagccccgtggtggtgggaacgaccgacaggtcgggcgcgcctacctacaactggggtgaaaatgacacggacgtcttcgtcctcaacaacaccaggccgccgctgggcaattggttcggttgacctggatgaactcaagtggattcaccaaagtgtgcggagcgcccccttgtgtcatcggaggggtgggcaacaacaccttgcgctgccccactgattgcttccgcaaacatccggaagccacatactctcggtgcggctccgtccttggatcacacccaggtgcatggtcgactacccatataggctttggcattatccttgtaccatcaactacaccttattcaaagtcaggatgtacgtgggaggggtcgagcacaggctggaagcgcctgcaactggacgcggggcgaacgctgtgatctggaagacagggacaggtccgagctcagtccgttactgctgtccaccacgcagtggcaggtccttccgtgttcttttacgaccctgccagccttgtccaccggcctctccacctccaccagaacattgtggacgtgcagtacttgtacggggtagggtcaagcatcgcgtcctgggccattaagtgggagtacgtcgttctcctgttccttctgcttgcagacgcgcgcgtctgtcctgcttgtggatgatgttactcatatcccaagcggaggcggctttggagaacctcgtagtactcaatgcagcatccctggccgggacgcacggtcttgtgtccttcctcgtgttcttctgctttgcgtggtatctgaaggtaggtgggcgcccggagcggtctacgccctctacgggatgtggcctctcctcctgctcctgctggcgctgcctcagcgggcatacgcactggacacggaggtggccgcgtcgtgtggcggcgttgtcttgtcgggttgatggcgctgactctgtcaccacattacaagcgcctcatctgctggtgcgtgtggtggcttcagtattttctaaccagaggggaagcgcacctgcacgtgtgggttccccccctcaacgtccgggggggggcgatgccatcatcttactcatgtgtgttatacacccggctctgatatttgacatcaccaaactgctgctggccgtcttcggacccctttggattcttcaagccagtttgctgaaagtcccctacttgtgcgcgttcaaggccttctccgaatctgcgcgctagcgcggaagttagccggaggtcattacgtgcagatggccatcatcaagttaggggcgcttactggcacctatgtctataaccatctcactcctctccgagactggcgcacaacggcctgcaagacctggccgtggctgtagaaccagtcatcttctcccgaatggagaccaaactcatcacgtggggggcagacaccgccgcgtgcggcgacatcatcaacggcttgcccgttccgcccgcaggggccgggagatattgcttggaccagccgacggaatggcctctaaagggtggaggttgctggcgcccatcacagcgtacgcccagcagacgagaggcctcctagggtgcataatcaccagcctgactggcgggataaaaaccaagtggagggtgaggtccagatcgtgtcaactgctacccaaaccttcctggcaacgtgcatcaatggggtatgctggactgtctaccacggggccggaacgaggaccatcgcatccccaggggtcctgttatccagatgtacaccaatgtggaccaggaccttgtgggctggcctgctcctcaaggttcccgctcattgacaccctgcacctgcggctcctcggacctttacctggtcacgaggcacgccgatgtcttcccgtgcgccggcgaggtgatagcaggggcagcttgctctcgccccggcccatttcctacttgaaaggctcctcggggggtccgctgttgtgccccgcgggacacgccgtgggcatatttagggcgcggtgtgcacccgtggtgtggctaaggcggtggacttcatccctgtggagaacctagagacaaccatgagatccccggtgttcacggacaactcttctccaccagcagtgccccagagcttccaggtggctcacctgcatctcccactggcagcggcaagagcaccaaggtcccggctgcgtacgcagctcagggctacaaagtgctagtgctcaacccctctgttgctgcaacattgggctttggtgcttacatgtccaaggctcaggggtcgatcctaatgtcaggacgggggtgcgaacaattaccaccggcagccccatcacgtactccacctacggcaagttccttgccgacggcgggtgctcaggaggtgcttatgacataataatttgtgatgagtgccacccacggatgccacatccatcttgggcatcggcactgtccttgaccaagcagagaccgcgggggcgagactggttgtgctcgccactgctacccctccgggctccgtcaccgtgccccatcctaacatgaggaggttgctctgtccaccaccggagagatccctttttacggcaaggctattcccctcgaggtcatcaaggggggaaggcatctcatcttctgccactcaaagaaaaagtgtgacgagctcgccgcaaagctggtcgcatgggcatcaatgccgtggcctactaccgcggtcttgacgtgtctgtcatcccgaccagcggcgatgttgtcgtcgtggcgaccgatgctctcatgactggctataccggcgacttcgactctgtgatgactgcaacacgtgtgtcacccagacagtcgatttcagccttgaccctaccttcaccattgagacaaccacgctcccccaagacgctgtctcccggactcaacgtcggggcagaaccggcagggggaagccaggcatctacgatttgtggcaccgggggaacgcccctccggcatgttcgactcgtccgtcatctgtgagtgctatgacgcgggctgtgcttggtatgagctcacgcccgccgagactacagttaggctacgagcgtaatgaacaccccggggctccccgtgtgccaggaccatcttgaattttgggagggcgtctttacgggcctcacccatatagatgcccactttctatcccagacaaagcagagtggagagaacttcccttacctggtagcgtacaagccaccgtgtgcgctagggctcaagcccctcccccatcgtgggaccagatgtggaagtgtttgatccgcctcaaacccaccctccatgggccaacacccctgctatacagactgggcgctgttcaaatgaagtcaccctgacgcacccagtcaccaaatacatcatgacatgcatgtcggctga

SEQ ID NO: 177 - DNA, 4869 bp, Hepatitis C virus
tcgcccacaggacgtcaagttcccgggtggcggtcagatcgttggtggagtttacttgttgccgcgcaggggccctagattgggtgtgcgcgcgacgaggaagacttccgagcggtcgcaacctcgagtagacgtcagcctatccccaaggcgcgtcggcccgagggcaggtcctgggctcagcccgggtacccttggcccctctatggcaatgagggttgcgggtgggcgggatggctcctgtctccccgtggtctcggcctagctggggccccacagacccccggcgtaggtcgcgcaatttgggtaaggtcatcgatacccttacgtgcggcttcgccgacctcatggggtacataccgctcgtcggcgcccctctcggaggcgctgccaggccctggcgcatggcgtcagggttctggaagacggcgtgaactatgcaacagggaatcttcctggttgctctttctctatcttccttctggctctgctctcttgcctgaccgtgcccgcttcagcctacaagtgcgcaactcttcggggctttaccatgtcaccaatgattgccctaactcgagtattgtgtacgaggcggccgatgccattctgcacactccggggtgtgtcccttgtgtttacgagggtaacacctcgaggtgttggtggcggtgacccccacagtggccaccagggacggcaaactccccacgacgcagcttcgacgccacatcgacctgcttgtcgggagtgccaccctctgctcggccctctacgtgggggatctgtgcggtctgtctttcttgtcggccaactgttcaccttctctcccaggcgccaccggacgatgcagaactgcaattgttctatctaccccggccatataacgggccaccgcatggcatgggatatgatgatgaactggtcccctacgtggcattggcggtagctcagctgctccggatcccacaagccatcatggacatgatcgctggtgctcactggggagtcctggcgggcatagcgtatttctccatggtggggaactgggcgaaggtcctgtagtgctgctgctatttgccggcgtcgacgcggagacccacgtcaccgggggagctgccggccgctccacggctgggattgctggtctcttcagcccaggcgccagacagaacatccaactgatcaataccaacggcagtggcacatcaatagcacggccctgaactgcaacgacagcctcaacaccggctggatagcagggctcttctattccaacaaattcaactcttcgggctgtcccgagaggttggccagctgccgacgcctgccgattttgcccagggctggggccccatcagttacgccaacggaagcggccccgacgaacgcccctactgctggcactaccccccaagaccttgtggtattgtgcccgctaagagcgtgtgtggcccggtgtattgcttcctcccagccccgtggtggtgggaacgaccgacaggtcgggcgcgcctacctacaactggggtgaaaatgacacggacgtcttcgtcctcaacaacaccaggccgccgctgggcaattggttcggttgacctggatgaactcaagtggattcaccaaagtgtgcggagcgcccccttgtgtcatcggaggggtgggcaacaacaccttgcgctgccccactgattgcttccgcaaacatccggaagccacatactctcggtgcggctccgtccttggatcacacccaggtgcatggtcgactacccatataggctttggcattatccttgtaccatcaactacaccttattcaaagtcaggatgtacgtgggaggggtcgagcacaggctggaagcgcctgcaactggacgcggggcgaacgctgtgatctggaagacagggacaggtccgagctcagtccgttactgctgtccaccacgcagtggcaggtccttccgtgttcttttacgaccctgccagccttgtccaccggcctctccacctccaccagaacattgtggacgtgcagtacttgtacggggtagggtcaagcatcgcgtcctgggccattaagtgggagtacgtcgttctcctgttccttctgcttgcagacgcgcgcgtctgtcctgcttgtggatgatgttactcatatcccaagcggaggcggctttggagaacctcgtagtactcaatgcagcatccctggccgggacgcacggtcttgtgtccttcctcgtgttcttctgctttgcgtggtatctgaaggtaggtgggcgcccggagcggtctacgccctctacgggatgtggcctctcctcctgctcctgctggcgctgcctcagcgggcatacgcactggacacggaggtggccgcgtcgtgtggcggcgttgtcttgtcgggttgatggcgctgactctgtcaccacattacaagcgcctcatctgctggtgcgtgtggtggcttcagtattttctaaccagagtggaagcgcacctgcacgtgtgggttccccccctcaacgtccgggggggggcgatgccatcatcttactcatgtgtgttatacacccggctctgatatttgacatcaccaaactgctgctggccgtcttcggacccctttggattcttcaagccagtttgctgaaagtcccctacttgtgcgcgttcaaggccttctccgaatctgcgcgctagcgcggaagttagccggaggtcattacgtgcagatggccatcatcaagttaggggcgcttactggcacctatgtctataaccatctcactcctctccgagactggcgcacaacggcctgcaagacctggccgtggctgtagaaccagtcatcttctcccgaatggagaccaaactcatcacgtggggggcagacaccgccgcgtgcggcgacatcatcaacggcttgcccgttccgcccgcaggggccgggagatattgcttggaccagccgacggaatggcctctaaagggtggaggttgctggcgcccatcacagcgtacgcccagcagacgagaggcctcctagggtgcataatcaccagcctgactggcgggataaaaaccaagtggagggtgaggtccagatcgtgtcaactgctacccaaaccttcctggcaacgtgcatcaatggggtatgctggactgtctaccacggggccggaacgaggaccatcgcatccccaggggtcctgttatccagatgtacaccaatgtggaccaggaccttgtgggctggcctgctcctcaaggttcccgctcattgacaccctgcacctgcggctcctcggacctttacctggtcacgaggcacgccgatgtcttcccgtgcgccggcgaggtgatagcaggggcagcttgctctcgccccggcccatttcctacttgaaaggctcctcggggggtccgctgttgtgccccgcgggacacgccgtgggcatatttagggcgcggtgtgcacccgtggtgtggctaaggcggtggacttcatccctgtggagaacctagagacaaccatgagatccccggtgttcacggacaactcttctccaccagcagtgccccagagcttccaggtggctcacctgcatctcccactggcagcggcaagagcaccaaggtcccggctgcgtacgcagctcagggctacaaagtgctagtgctcaacccctctgttgctgcaacattgggctttggtgcttacatgtccaaggctcaggggtcgatcctaatgtcaggacgggggtgcgaacaattaccaccggcagccccatcacgtactccacctacggcaagttccttgccgacggcgggtgctcaggaggtgcttatgacataataatttgtgatgagtgccacccacggatgccacatccatcttgggcatcggcactgtccttgaccaagcagagaccgcgggggcgagactggttgtgctcgccactgctacccctccgggctccgtcaccgtgccccatcctaacatgaggaggttgctctgtccaccaccggagagatccctttttacggcaaggctattcccctcgaggtcatcaaggggggaaggcatctcatcttctgccactcaaagaaaaagtgtgacgagctcgccgcaaagctggtcgcatgggcatcaatgccgtggcctactaccgcggtcttgacgtgtctgtcatcccgaccagcggcgatgttgtcgtcgtggcgaccgatgctctcatgactggctataccggcgacttcgactctgtgatgactgcaacacgtgtgtcacccagacagtcgatttcagccttgaccctaccttcaccattgagacaaccacgctcccccaagacgctgtctcccggactcaacgtcggggcagaaccggcagggggaagccaggcatctacgatttgtggcaccgggggaacgcccctccggcatgttcgactcgtccgtcatctgtgagtgctatgacgcgggctgtgcttggtatgagctcacgcccgccgagactacagttaggctacgagcgtaatgaacaccccggggctccccgtgtgccaggaccatcttgaattttgggagggcgtctttacgggcctcacccatatagatgcccactttctatcccagacaaagcagagtggagagaacttcccttacctggtagcgtacaagccaccgtgtgcgctagggctcaagcccctcccccatcgtgggaccagatgtggaagtgtttgatccgcctcaaacccaccctccatgggccaacacccctgctatacagactgggcgctgttcaaatgaagtcaccctgacgcacccagtcaccaaatacatcatgacatgcatgtcggctga

SEQ ID NO: 178 - DNA, 4869 bp, Hepatitis C virus
tcgcccacaggacgtcaagttcccgggtggcggtcagatcgttggtggagtttacttgttgccgcgcaggggccctagattgggtgtgcgcgcgacgaggaagacttccgagcggtcgcaacctcgagtagacgtcagcctatccccaaggcgcgtcggcccgagggcaggtcctgggctcagcccgggtacccttggcccctctatggcaatgagggttgcgggtgggcgggatggctcctgtctccccgtggtctcggcctagctggggccccacagacccccggcgtaggtcgcgcaatttgggtaaggtcatcgatacccttacgtgcggcttcgccgacctcatggggtacataccgctcgtcggcgcccctctcggaggcgctgccaggccctggcgcatggcgtcagggttctggaagacggcgtgaactatgcaacagggaatcttcctggttgctctttctctatcttccttctggctctgctctcttgcctgaccgtgcccgcttcagcctacaagtgcgcaactcttcggggctttaccatgtcaccaatgattgccctaactcgagtattgtgtacgaggcggccgatgccattctgcacactccggggtgtgtcccttgtgtttacgagggtaacacctcgaggtgttggtggcggtgacccccacagtggccaccagggacggcaaactccccacgacgcagcttcgacgccacatcgatctgcttgtcgggagtgccaccctctgctcggccctctacgtgggggatctgtgcggtctgtctttcttgtcggccaactgttcaccttctctcccaggcgccaccggacgatgcagaactgcaattgttctatctaccccggccatataacgggccaccgcatggcatgggatatgatgatgaactggtcccctacgtggcattggcggtagctcagctgctccggatcccacaagccatcatggacatgatcgctggtgctcactggggagtcctggcgggcatagcgtatttctccatggtggggaactgggcgaaggtcctgtagtgctgctgctatttgccggcgtcgacgcggagacccacgtcaccgggggagctgccggccgctccacggctgggattgctggtctcttcagcccaggcgccagacagaacatccaactgatcaataccaacggcagtggcacatcaatagcacggccctgaactgcaacgacagcctcaacaccggctggatagcagggctcttctattccaacaaattcaactcttcgggctgtcccgagaggttggccagctgccgacgcctgccgattttgcccagggctggggccccatcagttacgccaacggaagcggccccgacgaacgcccctactgctggcactaccccccaagaccttgtggtattgtgcccgctaagagcgtgtgtggcccggtgtattgcttcctcccagccccgtggtggtgggaacgaccgacaggtcgggcgcgcctacctacaactggggtgaaaatgacacggacgtcttcgtcctcaacaacaccaggccgccgctgggcaattggttcggttgacctggatgaactcaagtggattcaccaaagtgtgcggagcgcccccttgtgtcatcggaggggtgggcaacaacaccttgcgctgccccactgattgcttccgcaaacatccggaagccacatactctcggtgcggctccgtccttggatcacacccaggtgcatggtcgactacccatataggctttggcattatccttgtaccatcaactacaccttattcaaagtcaggatgtacgtgggaggggtcgagcacaggctggaagcgcctgcaactggacgcggggcgaacgctgtgatctggaagacagggacaggtccgagctcagtccgttactgctgtccaccacgcagtggcaggtccttccgtgttcttttacgaccctgccagccttgtccaccggcctctccacctccaccagaacattgtggacgtgcagtacttgtacggggtagggtcaagcatcgcgtcctgggccattaagtgggagtacgtcgttctcctgttccttctgcttgcagacgcgcgcgtctgtcctgcttgtggatgatgttactcatatcccaagcggaggcggctttggagaacctcgtagtactcaatgcagcatccctggccgggacgcacggtcttgtgtccttcctcgtgttcttctgctttgcgtggtatctgaaggtaggtgggcgcccggagcggtctacgccctctacgggatgtggcctctcctcctgctcctgctggcgctgcctcagcgggcatacgcactggacacggaggtggccgcgtcgtgtggcggcgttgtcttgtcgggttgatggcgctgactctgtcaccacattacaagcgcctcatctgctggtgcgtgtggtggcttcagtattttctaaccagagtggaagcgcacctgcacgtgtgggttccccccctcaacgtccgggggggggcgatgccatcatcttactcatgtgtgttatacacccggctctgatgtttgacatcaccaaactgctgctggccgtcttcggacccctttggattcttcaagccagtttgctgaaagtcccctacttgtgcgcgttcaaggccttctccgaatctgcgcgctagcgcggaagttagccggaggtcattacgtgcagatggccatcatcaagttaggggcgcttactggcacctatgtctataaccatctcactcctctccgagactggcgcacaacggcctgcaagacctggccgtggctgtagaaccagtcatcttctcccgaatggagaccaaactcatcacgtggggggcagacaccgccgcgtgcggcgacatcatcaacggcttgcccgttccgcccgcaggggccgggagatattgcttggaccagccgacggaatggcctctaaagggtggaggttgctggcgcccatcacagcgtacgcccagcagacgagaggcctcctagggtgcataatcaccagcctgactggcgggataaaaaccaagtggagggtgaggtccagatcgtgtcaactgctacccaaaccttcctggcaacgtgcatcaatggggtatgctggactgtctaccacggggccggaacgaggaccatcgcatccccaggggtcctgttatccagatgtacaccaatgtggaccaggaccttgtgggctggcctgctcctcaaggttcccgctcattgacaccctgcacctgcggctcctcggacctttacctggtcacgaggcacgccgatgtcttcccgtgcgccggcgaggtgatagcaggggcagcttgctctcgccccggcccatttcctacttgaaaggctcctcggggggtccgctgttgtgccccgcgggacacgccgtgggcatatttagggcgcggtgtgcacccgtggtgtggctaaggcggtggacttcatccctgtggagaacctagagacaaccatgagatccccggtgttcacggacaactcttctccaccagcagtgccccagagcttccaggtggctcacctgcatctcccactggcagcggcaagagcaccaaggtcccggctgcgtacgcagctcagggctacaaagtgctagtgctcaacccctctgttgctgcaacattgggctttggtgcttacatgtccaaggctcaggggtcgatcctaatgtcaggacgggggtgcgaacaattaccaccggcagccccatcacgtactccacctacggcaagttccttgccgacggcgggtgctcaggaggtgcttatgacataataatttgtgatgagtgccacccacggatgccacatccatcttgggcatcggcactgtccttgaccaagcagagaccgcgggggcgagactggttgtgctcgccactgctacccctccgggctccgtcaccgtgccccatcctaacatgaggaggttgctctgtccaccaccggagagatccctttttacggcaaggctattcccctcgaggtcatcaaggggggaaggcatctcatcttctgccactcaaagaaaaagtgtgacgagctcgccgcaaagctggtcgcatgggcatcaatgccgtggcctactaccgcggtcttgacgtgtctgtcatcccgaccagcggcgatgttgtcgtcgtggcgaccgatgctctcatgactggctataccggcgacttcgactctgtgatgactgcaacacgtgtgtcacccagacagtcgatttcagccttgaccctaccttcaccattgagacaaccacgctcccccaagacgctgtctcccggactcaacgtcggggcagaaccggcagggggaagccaggcatctacgatttgtggcaccgggggaacgcccctccggcatgttcgactcgtccgtcatctgtgagtgctatgacgcgggctgtgcttggtatgagctcacgcccgccgagactacagttaggctacgagcgtaatgaacaccccggggctccccgtgtgccaggaccatcttgaattttgggagggcgtctttacgggcctcacccatatagatgcccactttctatcccagacaaagcagagtggagagaacttcccttacctggtagcgtacaagccaccgtgtgcgctagggctcaagcccctcccccatcgtgggaccagatgtggaagtgtttgatccgcctcaaacccaccctccatgggccaacacccctgctatacagactgggcgctgttcaaatgaagtcaccctgacgcacccagtcaccaaatacatcatgacatgcatgtcggctga

SEQ ID NO: 179 - DNA, 4869 bp, Hepatitis C virus
tcgcccacaggacgtcaagttcccgggtggcggtcagatcgttggtggagtttacttgttgccgcgcaggggccctagattgggtgtgcgcgcgacgaggaagacttccgagcggtcgcaacctcgagtagacgtcagcctatccccaaggcgcgtcggcccgagggcaggtcctgggctcagcccgggtacccttggcccctctatggcaatgagggttgcgggtgggcgggatggctcctgtctccccgtggtctcggcctagctggggccccacagacccccggcgtaggtcgcgcaatttgggtaaggtcatcgatacccttacgtgcggcttcgccgacctcatggggtacataccgctcgtcggcgcccctctcggaggcgctgccaggccctggcgcatggcgtcagggttctggaagacggcgtgaactatgcaacagggaatcttcctggttgctctttctctatcttccttctggctctgctctcttgcctgaccgtgcccgcttcagcctacaagtgcgcaactcttcggggctttaccatgtcaccaatgattgccctaactcgagtattgtgtacgaggcggccgatgccattctgcacactccggggtgtgtcccttgtgtttacgagggtaacacctcgaggtgttggtggcggtgacccccacagtggccaccagggacggcaaactccccacgacgcagcttcgacgccacatcgatctgcttgtcgggagtgccaccctctgctcggccctctacgtgggggatctgtgcggtctgtctttcttgtcggccaactgttcaccttctctcccaggcgccaccggacgatgcagaactgcaattgttctatctaccccggccatataacgggccaccgcatggcatgggatatgatgatgaactggtcccctacgtggcattggcggtagctcagctgctccggatcccacaagccatcatggacatgatcgctggtgctcactggggagtcctggcgggcatagcgtatttctccatggtggggaactgggcgaaggtcctgtagtgctgctgctatttgccggcgtcgacgcggagacccacgtcaccgggggagctgccggccgctccacggctgggattgctggtctcttcagcccaggcgccagacagaacatccaactgatcaataccaacggcagtggcacatcaatagcacggccctgaactgcaacgacagcctcaacaccggctggatagcagggctcttctattccaacaaattcaactcttcgggctgtcccgagaggttggccagctgccgacgcctgccgattttgcccagggctggggccccatcagttacgccaacggaagcggccccgacgaacgcccctactgctggcactaccccccaagaccttgtggtattgtgcccgctaagagcgtgtgtggcccggtgtattgcttcctcccagccccgtggtggtgggaacgaccgacaggtcgggcgcgcctacctacaactggggtgaaaatgacacggacgtcttcgtcctcaacaacaccaggccgccgctgggcaattggttcggttgacctggatgaactcaagtggattcaccaaagtgtgcggagcgcccccttgtgtcatcggaggggtgggcaacaacaccttgcgctgccccactgattgcttccgcaaacatccggaagccacatactctcggtgcggctccgtccttggatcacacccaggtgcatggtcgactacccatataggctttggcattatccttgtaccatcaactacaccttattcaaagtcaggatgtacgtgggaggggtcgagcacaggctggaagcgcctgcaactggacgcggggcgaacgctgtgatctggaagacagggacaggtccgagctcagtccgttactgctgtccaccacgcagtggcaggtccttccgtgttcttttacgaccctgccagccttgtccaccggcctctccacctccaccagaacattgtggacgtgcagtacttgtacggggtagggtcaagcatcgcgtcctgggccattaagtgggagtacgtcgttctcctgttccttctgcttgcagacgcgcgcgtctgtcctgcttgtggatgatgttactcatatcccaagcggaggcggctttggagaacctcgtagtactcaatgcagcatccctggccgggacgcacggtcttgtgtccttcctcgtgttcttctgctttgcgtggtatctgaaggtaggtgggcgcccggagcggtctacgccctctacgggatgtggcctctcctcctgctcctgctggcgctgcctcagcgggcatacgcactggacacggaggtggccgcgtcgtgtggcggcgttgtcttgtcgggttgatggcgctgactctgtcaccacattacaagcgcctcatctgctggtgcgtgtggtggcttcagtattttctaaccagagtggaagcgcacctgcacgtgtgggttccccccctcaacgtccgggggggggcgatgccatcatcttactcatgtgtgttatacacccggctctgatatttgacatcaccaaactgctgctggccgtcttcggacccctttggattcttcaagccagtttgctgaaagtcccctacttgtgcgcgttcaaggccttctccgaatctgcgcgctagcgcggaagttagccggaggtcattacgtgcagatggccatcatcaagttaggggcgcttactggcacctatgtctataaccatctcactcctctccgagactggcgcacaacggcctgcaagacctggccgtggctgtagaaccagtcatcttctcccgaatggagaccaaactcatcacgtggggggcagacaccgccgcgtgcggcgacatcatcaacggcttgcccgttccgcccgcaggggccgggagatattgcttggaccagccgacggaatggcctctaaagggtggaggttgctggcgcccatcacagcgtacgcccagcagacgagaggcctcctagggtgcataatcaccagcctgactggcgggataaaaaccaagtggagggtgaggtccagatcgtgtcaactgctacccaaaccttcctggcaacgtgcatcaatggggtatgctggactgtctaccatggggccggaacgaggaccatcgcatccccaggggtcctgttatccagatgtacaccaatgtggaccaggaccttgtgggctggcctgctcctcaaggttcccgctcattgacaccctgcacctgcggctcctcggacctttacctggtcacgaggcacgccgatgtcttcccgtgcgccggcgaggtgatagcaggggcagcttgctctcgccccggcccatttcctacttgaaaggctcctcggggggtccgctgttgtgccccgcgggacacgccgtgggcatatttagggcgcggtgtgcacccgtggtgtggctaaggcggtggacttcatccctgtggagaacctagagacaaccatgagatccccggtgttcacggacaactcttctccaccagcagtgccccagagcttccaggtggctcacctgcatctcccactggcagcggcaagagcaccaaggtcccggctgcgtacgcagctcagggctacaaagtgctagtgctcaacccctctgttgctgcaacattgggctttggtgcttacatgtccaaggctcaggggtcgatcctaatgtcaggacgggggtgcgaacaattaccaccggcagccccatcacgtactccacctacggcaagttccttgccgacggcgggtgctcaggaggtgcttatgacataataatttgtgatgagtgccacccacggatgccacatccatcttgggcatcggcactgtccttgaccaagcagagaccgcgggggcgagactggttgtgctcgccactgctacccctccgggctccgtcaccgtgccccatcctaacatgaggaggttgctctgtccaccaccggagagatccctttttacggcaaggctattcccctcgaggtcatcaaggggggaaggcatctcatcttctgccactcaaagaaaaagtgtgacgagctcgccgcaaagctggtcgcatgggcatcaatgccgtggcctactaccgcggtcttgacgtgtctgtcatcccgaccagcggcgatgttgtcgtcgtggcgaccgatgctctcatgactggctataccggcgacttcgactctgtgatgactgcaacacgtgtgtcacccagacagtcgatttcagccttgaccctaccttcaccattgagacaaccacgctcccccaagacgctgtctcccggactcaacgtcggggcagaaccggcagggggaagccaggcatctacgatttgtggcaccgggggaacgcccctccggcatgttcgactcgtccgtcatctgtgagtgctatgacgcgggctgtgcttggtatgagctcacgcccgccgagactacagttaggctacgagcgtaatgaacaccccggggctccccgtgtgccaggaccatcttgaattttgggagggcgtctttacgggcctcacccatatagatgcccactttctatcccagacaaagcagagtggagagaacttcccttacctggtagcgtacaagccaccgtgtgcgctagggctcaagcccctcccccatcgtgggaccagatgtggaagtgtttgatccgcctcaaacccaccctccatgggccaacacccctgctatacagactgggcgctgttcaaatgaagtcaccctgacgcacccagtcaccaaatacatcatgacatgcatgtcggctga

SEQ ID NO: 180 - DNA, 4869 bp, Hepatitis C virus
tcgcccacaggacgtcaagttcccgggtggcggtcagatcgttggtggagtttacttgttgccgcgcaggggccctagattgggtgtgcgcgcgacgaggaagacttccgagcggtcgcaacctcgagtagacgtcagcctatccccaaggcgcgtcggcccgagggcaggtcctgggctcagcccgggtacccttggcccctctatggcaatgagggttgcgggtgggcgggatggctcctgtctccccgtggtctcggcctagctggggccccacagacccccggcgtaggtcgcgcaatttgggtaaggtcatcgatacccttacgtgcggcttcgccgacctcatggggtacataccgctcgtcggcgcccctctcggaggcgctgccaggccctggcgcatggcgtcagggttctggaagacggcgtgaactatgcaacagggaatcttcctggttgctctttctctatcttccttctggctctgctctcttgcctgaccgtgcccgcttcagcctacaagtgcgcaactcttcggggctttaccatgtcaccaatgattgccctaactcgagtattgtgtacgaggcggccgatgccattctgcacactccggggtgtgtcccttgtgtttacgagggtaacacctcgaggtgttggtggcggtgacccccacagtggccaccagggacggcaaactccccacgacgcagcttcgacgccacatcgatctgcttgtcgggagtgccaccctctgctcggccctctacgtgggggatctgtgcggtctgtctttcttgtcggccaactgttcaccttctctcccaggcgccaccggacgatgcagaactgcaattgttctatctaccccggccatataacgggccaccgcatggcatgggatatgatgatgaactggtcccctacgtggcattggcggtagctcagctgctccggatcccacaagccatcatggacatgatcgttggtgctcactggggagtcctggcgggcatagcgtatttctccatggtggggaactgggcgaaggtcctgtagtgctgctgctatttgccggcgtcgacgcggagacccacgtcaccgggggagctgccggccgctccacggctgggattgctggtctcttcagcccaggcgccagacagaacatccaactgatcaataccaacggcagtggcacatcaatagcacggccctgaactgcaacgacagcctcaacaccggctggatagcagggctcttctattccaacaaattcaactcttcgggctgtcccgagaggttggccagctgccgacgcctgccgattttgcccagggctggggccccatcagttacgccaacggaagcggccccgacgaacgcccctactgctggcactaccccccaagaccttgtggtattgtgcccgctaagagcgtgtgtggcccggtgtattgcttcctcccagccccgtggtggtgggaacgaccgacaggtcgggcgcgcctacctacaactggggtgaaaatgacacggacgtcttcgtcctcaacaacaccaggccgccgctgggcaattggttcggttgacctggatgaactcaagtggattcaccaaagtgtgcggagcgcccccttgtgtcatcggaggggtgggcaacaacaccttgcgctgccccactgattgcttccgcaaacatccggaagccacatactctcggtgcggctccgtccttggatcacacccaggtgcatggtcgactacccatataggctttggcattatccttgtaccatcaactacaccttattcaaagtcaggatgtacgtgggaggggtcgagcacaggctggaagcgcctgcaactggacgcggggcgaacgctgtgatctggaagacagggacaggtccgagctcagtccgttactgctgtccaccacgcagtggcaggtccttccgtgttcttttacgaccctgccagccttgtccaccggcctctccacctccaccagaacattgtggacgtgcagtacttgtacggggtagggtcaagcatcgcgtcctgggccattaagtgggagtacgtcgttctcctgttccttctgcttgcagacgcgcgcgtctgtcctgcttgtggatgatgttactcatatcccaagcggaggcggctttggagaacctcgtagtactcaatgcagcatccctggccgggacgcacggtcttgtgtccttcctcgtgttcttctgctttgcgtggtatctgaaggtaggtgggcgcccggagcggtctacgccctctacgggatgtggcctctcctcctgctcctgctggcgctgcctcagcgggcatacgcactggacacggaggtggccgcgtcgtgtggcggcgttgtcttgtcgggttgatggcgctgactctgtcaccacattacaagcgcctcatctgctggtgcgtgtggtggcttcagtattttctaaccagagtggaagcgcacctgcacgtgtgggttccccccctcaacgtccgggggggggcgatgccatcatcttactcatgtgtgttatacacccggctctgatatttgacatcaccaaactgctgctggccgtcttcggacccctttggattcttcaagccagtttgctgaaagtcccctacttgtgcgcgttcaaggccttctccgaatctgcgcgctagcgcggaagttagccggaggtcattacgtgcagatggccatcatcaagttaggggcgcttactggcacctatgtctataaccatctcactcctctccgagactggcgcacaacggcctgcaagacctggccgtggctgtagaaccagtcatcttctcccgaatggagaccaaactcatcacgtggggggcagacaccgccgcgtgcggcgacatcatcaacggcttgcccgttccgcccgcaggggccgggagatattgcttggaccagccgacggaatggcctctaaagggtggaggttgctggcgcccatcacagcgtacgcccagcagacgagaggcctcctagggtgcataatcaccagcctgactggcgggataaaaaccaagtggagggtgaggtccagatcgtgtcaactgctacccaaaccttcctggcaacgtgcatcaatggggtatgctggactgtctaccacggggccggaacgaggaccatcgcatccccaggggtcctgttatccagatgtacaccaatgtggaccaggaccttgtgggctggcctgctcctcaaggttcccgctcattgacaccctgcacctgcggctcctcggacctttacctggtcacgaggcacgccgatgtcttcccgtgcgccggcgaggtgatagcaggggcagcttgctctcgccccggcccatttcctacttgaaaggctcctcggggggtccgctgttgtgccccgcgggacacgccgtgggcatatttagggcgcggtgtgcacccgtggtgtggctaaggcggtggacttcatccctgtggagaacctagagacaaccatgagatccccggtgttcacggacaactcttctccaccagcagtgccccagagcttccaggtggctcacctgcatctcccactggcagcggcaagagcaccaaggtcccggctgcgtacgcagctcagggctacaaagtgctagtgctcaacccctctgttgctgcaacattgggctttggtgcttacatgtccaaggctcaggggtcgatcctaatgtcaggacgggggtgcgaacaattaccaccggcagccccatcacgtactccacctacggcaagttccttgccgacggcgggtgctcaggaggtgcttatgacataataatttgtgatgagtgccacccacggatgccacatccatcttgggcatcggcactgtccttgaccaagcagagaccgcgggggcgagactggttgtgctcgccactgctacccctccgggctccgtcaccgtgccccatcctaacatgaggaggttgctctgtccaccaccggagagatccctttttacggcaaggctattcccctcgaggtcatcaaggggggaaggcatctcatcttctgccactcaaagaaaaagtgtgacgagctcgccgcaaagctggtcgcatgggcatcaatgccgtggcctactaccgcggtcttgacgtgtctgtcatcccgaccagcggcgatgttgtcgtcgtggcgaccgatgctctcatgactggctataccggcgacttcgactctgtgatgactgcaacacgtgtgtcacccagacagtcgatttcagccttgaccctaccttcaccattgagacaaccacgctcccccaagacgctgtctcccggactcaacgtcggggcagaaccggcagggggaagccaggcatctacgatttgtggcaccgggggaacgcccctccggcatgttcgactcgtccgtcatctgtgagtgctatgacgcgggctgtgcttggtatgagctcacgcccgccgagactacagttaggctacgagcgtaatgaacaccccggggctccccgtgtgccaggaccatcttgaattttgggagggcgtctttacgggcctcacccatatagatgcccactttctatcccagacaaagcagagtggagagaacttcccttacctggtagcgtacaagccaccgtgtgcgctagggctcaagcccctcccccatcgtgggaccagatgtggaagtgtttgatccgcctcaaacccaccctccatgggccaacacccctgctatacagactgggcgctgttcaaatgaagtcaccctgacgcacccagtcaccaaatacatcatgacatgcatgtcggctga

SEQ ID NO: 181 - DNA, 4869 bp, Hepatitis C virus
tcgcccacaggacgtcaagttcccgggtggcggtcagatcgttggtggagtttacttgttgccgcgcaggggccctagattgggtgtgcgcgcgacgaggaagacttccgagcggtcgcaacctcgagtagacgtcagcctatccccaaggcgcgtcggcccgagggcaggtcctgggctcagcccgggtacccttggcccctctatggcaataagggttgcgggtgggcgggatggctcctgtctccccgtggtctcggcctagctggggccccacagacccccggcgtaggtcgcgcaatttgggtaaggtcatcgatacccttacgtgcggcttcgccgacctcatggggtacataccgctcgtcggcgcccctctcggaggcgctgccaggccctggcgcatggcgtcagggttctggaagacggcgtgaactatgcaacagggaatcttcctggttgctctttctctatcttccttctggctctgctctcttgcctgaccgtgcccgcttcagcctacaagtgcgcaactcttcggggctttaccatgtcaccaatgattgccctaactcgagtattgtgtacgaggcggccgatgccattctgcacactccggggtgtgtcccttgtgtttacgagggtaacacctcgaggtgttggtggcggtgacccccacagtggccaccagggacggcaaactccccacgacgcagcttcgacgccacatcgatctgcttgtcgggagtgccaccctctgctcggccctctacgtgggggatctgtgcggtctgtctttcttgtcggccaactgttcaccttctctcccaggcgccaccggacgatgcagaactgcaattgttctatctaccccggccatataacgggccaccgcatggcatgggatatgatgatgaactggtcccctacgtggcattggcggtagctcagctgctccggatcccacaagccatcatggacatgatcgctggtgctcactggggagtcctggcgggcatagcgtatttctccatggtggggaactgggcgaaggtcctgtagtgctgctgctatttgccggcgtcgacgcggagacccacgtcaccgggggagctgccggccgctccacggctgggattgctggtctcttcagcccaggcgccagacagaacatccaactgatcaataccaacggcagtggcacatcaatagcacggccctgaactgcaacgacagcctcaacaccggctggatagcagggctcttctattccaacaaattcaactcttcgggctgtcccgagaggttggccagctgccgacgcctgccgattttgcccagggctggggccccatcagttacgccaacggaagcggccccgacgaacgcccctactgctggcactaccccccaagaccttgtggtattgtgcccgctaagagcgtgtgtggcccggtgtattgcttcctcccagccccgtggtggtgggaacgaccgacaggtcgggcgcgcctacctacaactggggtgaaaatgacacggacgtcttcgtcctcaacaacaccaggccgccgctgggcaattggttcggttgacctggatgaactcaagtggattcaccaaagtgtgcggagcgcccccttgtgtcatcggaggggtgggcaacaacaccttgcgctgccccactgattgcttccgcaaacatccggaagccacatactctcggtgcggctccgtccttggatcacacccaggtgcatggtcgactacccatataggctttggcattatccttgtaccatcaactacaccttattcaaagtcaggatgtacgtgggaggggtcgagcacaggctggaagcgcctgcaactggacgcggggcgaacgctgtgatctggaagacagggacaggtccgagctcagtccgttactgctgtccaccacgcagtggcaggtccttccgtgttcttttacgaccctgccagccttgtccaccggcctctccacctccaccagaacattgtggacgtgcagtacttgtacggggtagggtcaagcatcgcgtcctgggccattaagtgggagtacgtcgttctcctgttccttctgcttgcagacgcgcgcgtctgtcctgcttgtggatgatgttactcatatcccaagcggaggcggctttggagaacctcgtagtactcaatgcagcatccctggccgggacgcacggtcttgtgtccttcctcgtgttcttctgctttgcgtggtatctgaaggtaggtgggcgcccggagcggtctacgccctctacgggatgtggcctctcctcctgctcctgctggcgctgcctcagcgggcatacgcactggacacggaggtggccgcgtcgtgtggcggcgttgtcttgtcgggttgatggcgctgactctgtcaccacattacaagcgcctcatctgctggtgcgtgtggtggcttcagtattttctaaccagagtggaagcgcacctgcacgtgtgggttccccccctcaacgtccgggggggggcgatgccatcatcttactcatgtgtgttatacacccggctctgatatttgacatcaccaaactgctgctggccgtcttcggacccctttggattcttcaagccagtttgctgaaagtcccctacttgtgcgcgttcaaggccttctccgaatctgcgcgctagcgcggaagttagccggaggtcattacgtgcagatggccatcatcaagttaggggcgcttactggcacctatgtctataaccatctcactcctctccgagactggcgcacaacggcctgcaagacctggccgtggctgtagaaccagtcatcttctcccgaatggagaccaaactcatcacgtggggggcagacaccgccgcgtgcggcgacatcatcaacggcttgcccgttccgcccgcaggggccgggagatattgcttggaccagccgacggaatggcctctaaagggtggaggttgctggcgcccatcacagcgtacgcccagcagacgagaggcctcctagggtgcataatcaccagcctgactggcgggataaaaaccaagtggagggtgaggtccagatcgtgtcaactgctacccaaaccttcctggcaacgtgcatcaatggggtatgctggactgtctaccacggggccggaacgaggaccatcgcatccccaggggtcctgttatccagatgtacaccaatgtggaccaggaccttgtgggctggcctgctcctcaaggttcccgctcattgacaccctgcacctgcggctcctcggacctttacctggtcacgaggcacgccgatgtcttcccgtgcgccggcgaggtgatagcaggggcagcttgctctcgccccggcccatttcctacttgaaaggctcctcggggggtccgctgttgtgccccgcgggacacgccgtgggcatatttagggcgcggtgtgcacccgtggtgtggctaaggcggtggacttcatccctgtggagaacctagagacaaccatgagatccccggtgttcacggacaactcttctccaccagcagtgccccagagcttccaggtggctcacctgcatctcccactggcagcggcaagagcaccaaggtcccggctgcgtacgcagctcagggctacaaagtgctagtgctcaacccctctgttgctgcaacattgggctttggtgcttacatgtccaaggctcaggggtcgatcctaatgtcaggacgggggtgcgaacaattaccaccggcagccccatcacgtactccacctacggcaagttccttgccgacggcgggtgctcaggaggtgcttatgacataataatttgtgatgagtgccacccacggatgccacatccatcttgggcatcggcactgtccttgaccaagcagagaccgcgggggcgagactggttgtgctcgccactgctacccctccgggctccgtcaccgtgccccatcctaacatgaggaggttgctctgtccaccaccggagagatccctttttacggcaaggctattcccctcgaggtcatcaaggggggaaggcatctcatcttctgccactcaaagaaaaagtgtgacgagctcgccgcaaagctggtcgcatgggcatcaatgccgtggcctactaccgcggtcttgacgtgtctgtcatcccgaccagcggcgatgttgtcgtcgtggcgaccgatgctctcatgactggctataccggcgacttcgactctgtgatgactgcaacacgtgtgtcacccagacagtcgatttcagccttgaccctaccttcaccattgagacaaccacgctcccccaagacgctgtctcccggactcaacgtcggggcagaaccggcagggggaagccaggcatctacgatttgtggcaccgggggaacgcccctccggcatgttcgactcgtccgtcatctgtgagtgctatgacgcgggctgtgcttggtatgagctcacgcccgccgagactacagttaggctacgagcgtaatgaacaccccggggctccccgtgtgccaggaccatcttgaattttgggagggcgtctttacgggcctcacccatatagatgcccactttctatcccagacaaagcagagtggagagaacttcccttacctggtagcgtacaagccaccgtgtgcgctagggctcaagcccctcccccatcgtgggaccagatgtggaagtgtttgatccgcctcaaacccaccctccatgggccaacacccctgctatacagactgggcgctgttcaaatgaagtcaccctgacgcacccagtcaccaaatacatcatgacatgcatgtcggctga

SEQ ID NO: 182 - DNA, 4868 bp, Hepatitis C virus
tcgcccacaggacgtcaagttcccgggtggcggtcagatcgttggtggagtttacttgttgccgcgcaggggccctagattgggtgtgcgcgcgacgaggaagacttccgagcggtcgcaacctcgagtagacgtcagcctatccccaaggcgcgtcagcccgagggcaggtcctgggctcagcccgggtacccttggcccctctatggcaatgagggttgcgggtgggcgggatggctcctgtctccccgtggtctcggcctagctggggccccacagacccccggcgtaggtcgcgcaatttgggtaaggtcatcgatacccttacgtgcggcttcgccgacctcatggggtacataccgctcgtcggcgcccctctcggaggcgctgccaggccctggcgcatggcgtcagggttctggaagacggcgtgaactatgcaacagggaatcttcctggttgctctttctctatcttccttctggctctgctctcttgcctgaccgtgcccgcttcagcctacaagtgcgcaactcttcggggctttaccatgtcaccaatgattgccctaactcgagtattgtgtacgaggcggccgatgccattctgcacactccggggtgtgtcccttgtgtttacgagggtaacacctcgaggtgttggtggcggtgacccccacagtggccaccagggacggcaaactccccacgacgcagcttcgacgccacatcgatctgcttgtcgggagtgccaccctctgctcggccctctacgtgggggatctgtgcggtctgtctttcttgtcggccaactgttcaccttctctcccaggcgccaccggacgatgcagaactgcaattgttctatctaccccggccatataacgggccaccgcatggcatgggatatgatgatgaactggtcccctacgtggcattggcggtagctcagctgctccggatcccacaagccatcatggacatgatcgctggtgctcactggggagtcctggcgggcatagcgtatttctccatggtggggaactgggcgaaggtcctgtagtgctgctgctatttgccggcgtcgacgcggagacccacgtcaccgggggagctgccggccgctccacggctgggattgctggtctcttcagcccaggcgccagacagaacatccaactgatcaataccaacggcagtggcacatcaatagcacggccctgaactgcaacgacagcctcaacaccggctggatagcagggctcttctattccaacaaattcaactcttcgggctgtcccgagaggttggccagctgccgacgcctgccgattttgcccagggctggggccccatcagttacgccaacggaagcggccccgacgaacgcccctactgctggcactaccccccaagaccttgtggtattgtgcccgctaagagcgtgtgtggcccggtgtattgcttcctcccagccccgtggtggtgggaacgaccgacaggtcgggcgcgcctacctacaactggggtgaaaatgacacggacgtcttcgtcctcaacaacaccaggccgccgctgggcaattggttcggttgacctggatgaactcaagtggattcaccaaagtgtgcggagcgcccccttgtgtcatcggaggggtgggcaacaacaccttgcgctgccccactgattgcttccgcaaacatccggaagccacatactctcggtgcggctccgtccttggatcacacccaggtgcatggtcgactacccatataggctttggcattatccttgtaccatcaactacaccttattcaaagtcaggatgtacgtgggaggggtcgagcacaggctggaagcgcctgcaactggacgcggggcgaacgctgtgatctggaagacagggacaggtccgagctcagtccgttactgctgtccaccacgcagtggcaggtccttccgtgttcttttacgaccctgccagccttgtccaccggcctctccacctccaccagaacattgtggacgtgcagtacttgtacggggtagggtcaagcatcgcgtcctgggccattaagtgggagtacgtcgttctcctgttccttctgcttgcagacgcgcgcgtctgtcctgcttgtggatgatgttactcatatcccaagcggaggcggctttggagaacctcgtagtactcaatgcagcatccctggccgggacgcacggtcttgtgtccttcctcgtgttcttctgctttgcgtggtatctgaaggtaggtgggcgcccggagcggtctacgccctctacgggatgtggcctctcctcctgctcctgctggcgctgcctcagcgggcatacgcactggacacggaggtggccgcgtcgtgtggcggcgttgtcttgtcgggttgatggcgctgactctgtcaccacattacaagcgcctcatctgctggtgcgtgtggtggcttcagtattttctaaccagagtggaagcgcacctgcacgtgtgggttccccccctcaacgtccgggggggggcgatgccatcatcttactcatgtgtgttatacacccggctctgatatttgacatcaccaaactgctgctggccgtcttcggacccctttggattcttcaagccagtttgctgaaagtcccctacttgtgcgcgttcaaggccttctccgaatctgcgcgctagcgcggaagttagccggaggtcattacgtgcagatggccatcatcaagttaggggcgcttactggcacctatgtctataaccatctcactcctctccgagactggcgcacaacggcctgcaagacctggccgtggctgtagaaccagtcatcttctcccgaatggagaccaaactcatcacgtggggggcagacaccgccgcgtgcggcgacatcatcaacggcttgcccgttccgcccgcaggggccgggagatattgcttggaccagccgacggaatggcctctaaagggtggaggttgctggcgcccatcacagcgtacgcccagcagacgagaggcctcctagggtgcataatcaccagcctgactggcgggataaaaaccaagtggagggtgaggtccagatcgtgtcaactgctacccaaaccttcctggcaacgtgcatcaatggggtatgctggactgtctaccacggggccggaacgaggaccatcgcatccccaggggtcctgttatccagatgtacaccaatgtggaccaggaccttgtgggctggcctgctcctcaaggttcccgctcattgacaccctgcacctgcggctcctcggacctttacctggtcacgaggcacgccgatgtcttcccgtgcgccggcgaggtgatagcaggggaagcttgctctcgccccggcccatttcctacttgaaaggctcctcggggggtccgctgttgtgccccgcgggacacgccgtgggcatatttagggcgcggtgtgcacccgtggtgtggctaaggcggtggacttcatccctgtggagaacctagagacaaccatgagatccccggtgttcacggacaactcttctccaccagcagtgccccagagcttccaggtggctcacctgcatctcccactggcagcggcaagagcaccaaggtcccggctgcgtacgcagctcagggctacaaagtgctagtgctcaacccctctgttgctgcaacattgggctttggtgcttacatgtccaaggctcaggggtcgatcctaatgtcaggacgggggtgcgaacaattaccaccggcagccccatcacgtactccacctacggcaagttccttgccgacggcgggtgctcaggaggtgcttatgacataataatttgtgatgagtgccacccacggatgccacatccatcttgggcatcggcactgtccttgaccaagcagagaccgcgggggcgagactggttgtgctcgccactgctacccctccgggctccgtcaccgtgccccatcctaacatgaggaggttgctctgtccaccaccggagagatccctttttacggcaaggctattcccctcgaggtcatcaaggggggaaggcatctcatcttctgccactcaaagaaaaagtgtgacgagctcgccgcaaagctggtcgcatgggcatcaatgccgtggcctactaccgcggtcttgacgtgtctgtcatcccgaccagcggcgatgttgtcgtcgtggcgaccgatgctctcatgactggctataccggcgacttcgactctgtgatgactgcaacacgtgtgtcactcagacagtcgatttcagccttgaccctaccttcaccattgagacaaccacgctcccccaagacgctgtctcccggactcaacgtcggggcagaaccggcagggggaagccaggcatctacgatttgtggcaccgggggaacgcccctccggcatgttcgactcgtccgtcatctgtgagtgctatgacgcgggctgtgcttggtatgagctcacgcccgccgagactacagttaggctacgagcgtaatgaacaccccggggctccccgtgtgccaggaccatcttgaattttgggagggcgtctttacgggcctcacccatatagatgcccactttctatcccagacaaagcagagtggagagaacttcccttacctggtagcgtacaagccaccgtgtgcgctagggctcaagcccctcccccatcgtgggaccagatgtggaagtgtttgatccgcctcaaacccaccctccatgggccaacacccctgctatacagactgggcgctgttcaaatgaagtcaccctgacgcacccagtcaccaaatacatcatgacatgcatgtcggctg

SEQ ID NO: 183 - DNA, 4869 bp, Hepatitis C virus; identical to SEQ ID NO: 96

SEQ ID NO: 184 - DNA, 4869 bp, Hepatitis C virus; identical to SEQ ID NO: 96

SEQ ID NO: 185 - DNA, 4869 bp, Hepatitis C virus; identical to SEQ ID NO: 96

SEQ ID NO: 186 - DNA, 4869 bp, Hepatitis C virus
tcgcccacaggacgtcaagttcccgggtggcggtcagatcgttggtggagtttacttgttgccgcgcaggggccctagattgggtgtgcgcgcgacgaggaagacttccgagcggtcgcaacctcgagtagacgtcagcctatccccaaggcgcgtcggcccgagggcaggtcctgggctcagcccgggtacccttggcccctctatggcaatgagggttgcgggtgggcgggatggctcctgtctccccgtggtctcggcctagctggggccccacagacccccggcgtaggtcgcgcaatttgggtaaggtcatcgatacccttacgtgcggcttcgccgacctcatggggtacataccgctcgtcggcgcccctctcggaggcgctgccaggccctggcgcatggcgtcagggttctggaagacggcgtgaactatgcaacagggaatcttcctggttgctctttctctatcttccttctggctctgctctcttgcctgaccgtgcccgcttcagcctacaagtgcgcaactcttcggggctttaccatgtcaccaatgattgccctaactcgagtattgtgtacgaggcggccgatgccattctgcacactccggggtgtgtcccttgtgtttacgagggtaacacctcgaggtgttggtggcggtgacccccacagtggccaccagggacggcaaactccccacgacgcagcttcgacgccacatcgatctgcttgtcgggagtgccaccctctgctcggccctctacgtgggggatctgtgcggtctgtctttcttgtcggccaactgttcaccttctctcccaggcgccaccggacgatgcagaactgcaattgttctatctaccccggccatataacgggccaccgcatggcatgggatatgatgatgaactggtcccctacgtggcattggcggtagctcagctgctccggatcccacaagccatcatggacatgatcgctggtgctcactggggagtcctggcgggcatagcgtatttctccatggtggggaactgggcgaaggtcctgtagtgctgctgctatttgccggcgtcgacgcggagacccacgtcaccgggggagctgccggccgctccacggctgggattgctggtctcttcagcccaggcgccagacagaacatccaactgatcaataccaacggcagtggcacatcaatagcacggccctgaactgcaacgacagcctcaacaccggctggatagcagggctcttctattccaacaaattcaactcttcgggctgtcccgagaggttggccagctgccgacgcctgccgattttgcccagggctggggccccatcagttacgccaacggaagcggccccgacgaacgcccctactgctggcactaccccccaagaccttgtggtattgtgcccgctaagagcgtgtgtggcccggtgtattgcttcctcccagccccgtggtggtgggaacgaccgacaggtcgggcgcgcctacctacaactggggtgaaaatgacacggacgtcttcgtcctcaacaacaccaggccgccgctgggcaattggttcggttgacctggatgaactcaagtggattcaccaaagtgtgcggagcgcccccttgtgtcatcggaggggtgggcaacaacaccttgcgctgccccactgattgcttccgcaaacatccggaagccacatactctcggtgcggctccgtccttggatcacacccaggtgcatggtcgactacccatataggctttggcactatccttgtaccatcaactacaccttattcaaagtcaggatgtacgtgggaggggtcgagcacaggctggaagcgcctgcaactggacgcggggcgaacgctgtgatctggaagacagggacaggtccgagctcagtccgttactgctgtccaccacgcagtggcaggtccttccgtgttcttttacgaccctgccagccttgtccaccggcctctccacctccaccagaacattgtggacgtgcagtacttgtacggggtagggtcaagcatcgcgtcctgggccattaagtgggagtacgtcgttctcctgttccttctgcttgcagacgcgcgcgtctgtcctgcttgtggatgatgttactcatatcccaagcggaggcggctttggagaacctcgtagtactcaatgcagcatccctggccgggacgcacggtcttgtgtccttcctcgtgttcttctgctttgcgtggtatctgaaggtaggtgggcgcccggagcggtctacgccctctacgggatgtggcctctcctcctgctcctgctggcgctgcctcagcgggcatacgcactggacacggaggtggccgcgtcgtgtggcggcgttgtcttgtcgggttgatggcgctgactctgtcaccacattacaagcgcctcatctgctggtgcgtgtggtggcttcagtattttctaaccagagtggaagcgcacctgcacgtgtgggttccccccctcaacgtccgggggggggcgatgccatcatcttactcatgtgtgttatacacccggctctgatatttgacatcaccaaactgctgctggccgtcttcgggcccctttggattcttcaagccagtttgctgaaagtcccctacttgtgcgcgttcaaggccttctccgaatctgcgcgctagcgcggaagttagccggaggtcattacgtgcagatggccatcatcaagttaggggcgcttactggcacctatgtctataaccatctcactcctctccgagactggcgcacaacggcctgcaagacctggccgtggctgtagaaccagtcatcttctcccgaatggagaccaaactcatcacgtggggggcagacaccgccgcgtgcggcgacatcatcaacggcttgcccgttccgcccgcaggggccgggagatattgcttggaccagccgacggaatggcctctaaagggtggaggttgctggcgcccatcacagcgtacgcccagcagacgagaggcctcctagggtgcataatcaccagcctgactggcgggataaaaaccaagtggagggtgaggtccagatcgtgtcaactgctacccaaaccttcctggcaacgtgcatcaatggggtatgctggactgtctaccacggggccggaacgaggaccatcgcatccccaggggtcctgttatccagatgtacaccaatgtggaccaggaccttgtgggctggcctgctcctcaaggttcccgctcattgacaccctgcacctgcggctcctcggacctttacctggtcacgaggcacgccgatgtcttcccgtgcgccggcgaggtgatagcaggggcagcttgctctcgccccggcccatttcctacttgaaaggctcctcggggggtccgctgttgtgccccgcgggacacgccgtgggcatatttagggcgcggtgtgcacccgtggtgtggctaaggcggtggacttcatccctgtggagaacctagagacaaccatgagatccccggtgttcacggacaactcttctccaccagcagtgccccagagcttccaggtggctcacctgcatctcccactggcagcggcaagagcaccaaggtcccggctgcgtacgcagctcagggctacaaagtgctagtgctcaacccctctgttgctgcaacattgggctttggtgcttacatgtccaaggctcaggggtcgatcctaatgtcaggacgggggtgcgaacaattaccaccggcagccccatcacgtactccacctacggcaagttccttgccgacggcgggtgctcaggaggtgcttatgacataataatttgtgatgagtgccacccacggatgccacatccatcttgggcatcggcactgtccttgaccaagcagagaccgcgggggcgagactggttgtgctcgccactgctacccctccgggctccgtcaccgtgccccatcctaacatgaggaggttgctctgtccaccaccggagagatccctttttatggcaaggctattcccctcgaggtcatcaaggggggaaggcatctcatcttctgccactcaaagaaaaagtgtgacgagctcgccgcaaagctggtcgcatgggcatcaatgccgtggcctactaccgcggtcttgacgtgtctgtcatcccgaccagcggcgatgttgtcgtcgtggcgaccgatgctctcatgactggctataccggcgacttcgactctgtgatgactgcaacacgtgtgtcacccagacagtcgatttcagccttgaccctaccttcaccattgagacaaccacgctcccccaagacgctgtctcccggactcaacgtcggggcagaaccggcagggggaagccaggcatctacgatttgtggcaccgggggaacgcccctccggcatgttcgactcgtccgtcatctgtgagtgctatgacgcgggctgtgcttggtatgagctcacgcccgccgagactacagttaggctacgagcgtaatgaacaccccggggctccccgtgtgccaggaccatcttgaattttgggagggcgtctttacgggcctcacccatatagatgcccactttctatcccagacaaagcagagtggagagaacttcccttacctggtagcgtacaagccaccgtgtgcgctagggctcaagcccctcccccatcgtgggaccagatgtggaagtgtttgatccgcctcaaacccaccctccatgggccaacacccctgctatacagactgggcgctgttcaaatgaagtcaccctgacgcacccagtcaccaaatacatcatgacatgcatgtcggctga

SEQ ID NO: 187 - DNA, 4869 bp, Hepatitis C virus
tcgcccacaggacgtcaagttcccgggtggcggtcagatcgttggtggagtttacttgttgccgcgcaggggccctagattgggtgtgcgcgcgacgaggaagacttccgagcggtcgcaacctcgagtagacgtcagcctatccccaaggcgcgtcggcccgagggcaggtcctgggctcagcccgggtacccttggcccctctatggcaatgagggttgcgggtgggcgggatggctcctgtctccccgtggtctcggcctagctggggccccacagacccccggcgtaggtcgcgcaatttgggtaaggtcatcgatacccttacgtgcggcttcgccgacctcatggggtacataccgctcgtcggcgcccctctcggaggcgctgccaggccctggcgcatggcgtcagggttctggaagacggcgtgaactatgcaacagggaatcttcctggttgctctttctctatcttccttctggctctgctctcttgcctgaccgtgcccgcttcagcctacaagtgcgcaactcttcggggctttaccatgtcaccaatgattgccctaactcgagtattgtgtacgaggcggccgatgccattctgcacactccggggtgtgtcccttgtgtttacgagggtaacacctcgaggtgttggtggcggtgacccccacagtggccaccagggacggcaaactccccacgacgcagcttcgacgccacatcgatctgcttgtcgggagtgccaccctctgctcggccctctacgtgggggatctgtgcggtctgtctttcttgtcggccaactgttcaccttctctcccaggcgccaccggacgatgcagaactgcaattgttctatctaccccggccatataacgggccaccgcatggcatgggatatgatgatgaactggtcccctacgtggcattggcggtagctcagctgctccggatcccacaagccatcatggacatgatcgctggtgctcactggggagtcctggcgggcatagcgtatttctccatggtggggaactgggcgaaggtcctgtagtgctgctgctatttgccggcgtcgacgcggagacccacgtcaccgggggagctgccggccgctccacggctgggattgctggtctcttcagcccaggcgccagacagaacatccaactgatcaataccaacggcagtggcacatcaatagcacggccctgaactgcaacgacagcctcaacaccggctggatagcagggctcttctattccaacaaattcaactcttcgggctgtcccgagaggttggccagctgccgacgcctgccgattttgcccagggctggggccccatcagttacgccaacggaagcggccccgacgaacgcccctactgctggcactaccccccaagaccttgtggtattgtgcccgctaagagcgtgtgtggcccggtgtattgcttcctcccagccccgtggtggtgggaacgaccgacaggtcgggcgcgcctacctacaactggggtgaaaatgacacggacgtcttcgtcctcaacaacaccaggccgccgctgggcaattggttcggttgacctggatgaactcaagtggattcaccaaagtgtgcggagcgcccccttgtgtcatcggaggggtgggcaacaacaccttgcgctgccccactgattgcttccgcaaacatccggaagccacatactctcggtgcggctccgtccttggatcacacccaggtgcatggtcgactacccatataggctttggcattatccttgtaccatcaactacaccttattcaaagtcaggatgtacgtgggaggggtcgagcacaggctggaagcgcctgcaactggacgcggggcgaacgctgtgatctggaagacagggacaggtccgagctcagtccgttactgctgtccaccacgcagtggcaggtccttccgtgttcttttacgaccctgccagccttgtccaccggcctctccacctccaccagaacattgtggacgtgcagtacttgtacggggtagggtcaagcatcgcgtcctgggccattaagtgggagtacgtcgttctcctgttccttctgcttgcagacgcgcgcgtctgtcctgcttgtggatgatgttactcatatcccaagcggaggcggctttggagaacctcgtagtactcaatgcagcatccctggccgggacgcacggccttgtgtccttcctcgtgttcttctgctttgcgtggtatctgaaggtaggtgggcgcccggagcggtctacgccctctacgggatgtggcctctcctcctgctcctgctggcgctgcctcagcgggcatacgcactggacacggaggtggccgcgtcgtgtggcggcgttgtcttgtcgggttgatggcgctgactctgtcaccacattacaagcgcctcatctgctggtgcgtgtggtggcttcagtattttctaaccagagtggaagcgcacctgcacgtgtgggttccccccctcaacgtccgggggggggcgatgccatcatcttactcatgtgtgttatacacccggctctgatatttgacatcaccaaactgctgctggccgtcttcggacccctttggattcttcaagccagtttgctgaaagtcccctacttgtgcgcgttcaaggccttctccgaatctgcgcgctagcgcggaagttagccggaggtcattacgtgcagatggccatcatcaagttaggggcgcttactggcacctatgtctataaccatctcactcctctccgagactggcgcacaacggcctgcaagacctggccgtggctgtagaaccagtcatcttctcccgaatggagaccaaactcatcacgtggggggcagacaccgccgcgtgcggcgacatcatcaacggcttgcccgttccgcccgcaggggccgggagatattgcttggaccagccgacggaatggcctctaaagggtggaggttgctggcgcccatcacagcgtacgcccagcagacgagaggcctcctagggtgcataatcaccagcctgactggcgggataaaaaccaagtggagggtgaggtccagatcgtgtcaactgctacccaaaccttcctggcaacgtgcatcaatggggtatgctggactgtctaccacggggccggaacgaggaccatcgcatccccaggggtcctgttatccagatgtacaccaatgtggaccaggaccttgtgggctggcctgctcctcaaggttcccgctcattgacaccctgcacctgcggctcctcggacctttacctggtcacgaggcacgccgatgtcttcccgtgcgccggcgaggtgatagcaggggcagcttgctctcgccccggcccatttcctacttgaaaggctcctcggggggtccgctgttgtgccccgcgggacacgccgtgggcatatttagggcgcggtgtgcacccgtggtgtggctaaggcggtggacttcatccctgtggagaacctagagacaaccatgagatccccggtgttcacggacaactcttctccaccagcagtgccccagagcttccaggtggctcacctgcatctcccactggcagcggcaagagcaccaaggtcccggctgcgtacgcagctcagggctacaaagtgctagtgctcaacccctctgttgctgcaacattgggctttggtgcttacatgtccaaggctcaggggtcgatcctaatgtcaggacgggggtgcgaacaattaccaccggcagccccatcacgtactccacctacggcaagttccttgccgacggcgggtgctcaggaggtgcttatgacataataatttgtgatgagtgccacccacggatgccacatccatcttgggcatcggcactgtccttgaccaagcagagaccgcgggggcgagactggttgtgctcgccactgctacccctccgggctccgtcaccgtgccccatcctaacatgaggaggttgctctgtccaccaccggagagatccctttttacggcaaggctattcccctcgaggtcatcaaggggggaaggcatctcatcttctgccactcaaagaaaaagtgtgacgagctcgccgcaaagctggtcgcatgggcatcaatgccgtggcctactaccgcggtcttgacgtgtctgtcatcccgaccagcggcgatgttgtcgtcgtggcgaccgatgctctcatgactggctataccggcgacttcgactctgtgatgactgcaacacgtgtgtcacccagacagtcgatttcagccttgaccctaccttcaccattgagacaaccacgctcccccaagacgctgtctcccggactcaacgtcggggcagaaccggcagggggaagccaggcatctacgatttgtggcaccgggggaacgcccctccggcatgttcgactcgtccgtcatctgtgagtgctatgacgcgggctgtgcttggtatgagctcacgcccgccgagactacagttaggctacgagcgtaatgaacaccccggggctccccgtgtgccaggaccatcttgaattttgggagggcgtctttacgggcctcacccatatagatgcccactttctatcccagacaaagcagagtggagagaacttcccttacctggtagcgtacaagccaccgtgtgcgctagggctcaagcccctcccccatcgtgggaccagatgtggaagtgtttgatccgcctcaaacccaccctccatgggccaacacccctgctatacagactgggcgctgttcaaatgaagtcaccctgacgcacccagtcaccaaatacatcatgacatgcatgtcggctga

SEQ ID NO: 188 - DNA, 4869 bp, Hepatitis C virus
tcgcccacaggacgtcaagttcccgggtggcggtcagatcgttggtggagtttacttgttgccgcgcaggggccctagattgggtgtgcgcgcgacgaggaagacttccgagcggtcgcaacctcgagtagacgtcagcctatccccaaggcgcgtcggcccgagggcaggtcctgggctcagcccgggtacccttggcccctctatggcaatgagggttgcgggtgggcgggatggctcctgtctccccgtggtctcggcctagctggggccccacagacccccggcgtaggtcgcgcaatttgggtaaggtcatcgatacccttacgtgcggcttcgccgacctcatggggtacataccgctcgtcggcgcccctctcggaggcgctgccaggccctggcgcatggcgtcagggttctggaagacggcgtgaactatgcaacagggaatcttcctggttgctctttctctatcttccttctggctctgctctcttgcctgaccgtgcccgcttcagcctacaagtgcgcaactcttcggggctttaccatgtcaccaatgattgccctaactcgagtattgtgtacgaggcggccgatgccattctgcacactccggggtgtgtcccttgtgtttacgagggtaacacctcgaggtgttggtggcggtgacccccacagtggccaccagggacggcaaactccccacgacgcagcttcgacgccacatcgatctgcttgtcgggagtgccaccctctgctcggccctctacgtgggggatctgtgcggtctgtctttcttgtcggccaactgttcaccttctctcccaggcgccaccggacgatgcagaactgcaattgttctatctactccggccatataacgggccaccgcatggcatgggatatgatgatgaactggtcccctacgtggcattggcggtagctcagctgctccggatcccacaagccatcatggacatgatcgctggtgctcactggggagtcctggcgggcatagcgtatttctccatggtggggaactgggcgaaggtcctgtagtgctgctgctatttgccggcgtcgacgcggagacccacgtcaccgggggagctgccggccgctccacggctgggattgctggtctcttcagcccaggcgccagacagaacatccaactgatcaataccaacggcagtggcacatcaatagcacggccctgaactgcaacgacagcctcaacaccggctggatagcagggctcttctattccaacaaattcaactcttcgggctgtcccgagaggttggccagctgccgacgcctgccgattttgcccagggctggggccccatcagttacgccaacggaagcggccccgacgaacgcccctactgctggcactaccccccaagaccttgtggtattgtgcccgctaagagcgtgtgtggcccggtgtattgcttcctcccagccccgtggtggtgggaacgaccgacaggtcgggcgcgcctacctacaactggggtgaaaatgacacggacgtcttcgtcctcaacaacaccaggccgccgctgggcaattggttcggttgacctggatgaactcaagtggattcaccaaagtgtgcggagcgcccccttgtgtcatcggaggggtgggcaacaacaccttgcgctgccccactgattgcttccgcaaacatccggaagccacatactctcggtgcggctccgtccttggatcacacccaggtgcatggtcgactacccatataggctttggcattatccttgtaccatcaactacaccttattcaaagtcaggatgtacgtgggaggggtcgagcacaggctggaagcgcctgcaactggacgcggggcgaacgctgtgatctggaagacagggacaggtccgagctcagtccgttactgctgtccaccacgcagtggcaggtccttccgtgttcttttacgaccctgccagccttgtccaccggcctctccacctccaccagaacattgtggacgtgcagtacttgtacggggtagggtcaagcatcgcgtcctgggccattaagtgggagtacgtcgttctcctgttccttctgcttgcagacgcgcgcgtctgtcctgcttgtggatgatgttactcatatcccaagcggaggcggctttggagaacctcgtagtactcaatgcagcatccctggccgggacgcacggtcttgtgtccttcctcgtgttcttctgctttgcgtggtatctgaaggtaggtgggcgcccggagcggtctacgccctctacgggatgtggcctctcctcctgctcctgctggcgctgcctcagcgggcatacgcactggacacggaggtggccgcgtcgtgtggcggcgttgtcttgtcgggttgatggcgctgactctgtcaccacattacaagcgcctcatctgctggtgcgtgtggtggcttcagtattttctaaccagagtggaagcgcacctgcacgtgtgggttccccccctcaacgtccgggggggggcgatgccatcatcttactcatgtgtgttatacacccggctctgatatttgacatcaccaaactgctgctggccgtcttcggacccctttggattcttcaagccagtttgctgaaagtcccctacttgtgcgcgttcaaggccttctccgaatctgcgcgctagcgcggaagttagccggaggtcattacgtgcagatggccatcatcaagttaggggcgcttactggcacctatgtctataaccatctcactcctctccgagactggcgcacaacggcctgcaagacctggccgtggctgtagaaccagtcatcttctcccgaatggagaccaaactcatcacgtggggggcagacaccgccgcgtgcggcgacatcatcaacggcttgcccgttccgcccgcaggggccgggagatattgcttggaccagccgacggaatggcctctaaagggtggaggttgctggcgcccatcacagcgtacgcccagcagacgagaggcctcctagggtgcataatcaccagcctgactggcgggataaaaaccaagtggagggtgaggtccagatcgtgtcaactgctacccaaaccttcctggcaacgtgcatcaatggggtatgctggactgtctaccacggggccggaacgaggaccatcgcatccccaggggtcctgttatccagatgtacaccaatgtggaccaggaccttgtgggctggcctgctcctcaaggttcccgctcattgacaccctgcacctgcggctcctcggacctttacctggtcacgaggcacgccgatgtcttcccgtgcgccggcgaggtgatagcaggggcagcttgctctcgccccggcccatttcctacttgaaaggctcctcggggggtccgctgttgtgccccgcgggacacgccgtgggcatatttagggcgcggtgtgcacccgtggtgtggctaaggcggtggacttcatccctgtggagaacctagagacaaccatgagatccccggtgttcacggacaactcttctccaccagcagtgccccagagcttccaggtggctcacctgcatctcccactggcagcggcaagagcaccaaggtcccggctgcgtacgcagctcagggctacaaagtgctagtgctcaacccctctgttgctgcaacattgggctttggtgcttacatgtccaaggctcaggggtcgatcctaatgtcaggacgggggtgcgaacaattaccaccggcagccccatcacgtactccacctacggcaagttccttgccgacggcgggtgctcaggaggtgcttatgacataataatttgtgatgagtgccacccacggatgccacatccatcttgggcatcggcactgtccttgaccaagcagagaccgcgggggcgagactggttgtgctcgccactgctacccctccgggctccgtcaccgtgccccatcctaacatgaggaggttgctctgtccaccaccggagagatccctttttacggcaaggctattcccctcgaggtcatcaaggggggaaggcatctcatcttctgccactcaaagaaaaagtgtgacgagctcgccgcaaagctggtcgcatgggcatcaatgccgtggcctactaccgcggtcttgacgtgtctgtcatcccgaccagcggcgatgttgtcgtcgtggcgaccgatgctctcatgactggctataccggcgacttcgactctgtgatgactgcaacacgtgtgtcacccagacagtcgatttcagccttgaccctaccttcaccattgagacaaccacgctcccccaagacgctgtctcccggactcaacgtcggggcagaaccggcagggggaagccaggcatctacgatttgtggcaccgggggaacgcccctccggcatgttcgactcgtccgtcatctgtgagtgctatgacgcgggctgtgcttggtatgagctcacgcccgccgagactacagttaggctacgagcgtaatgaacaccccggggctccccgtgtgccaggaccatcttgaattttgggagggcgtctttacgggcctcacccatatagatgcccactttctatcccagacaaagcagagtggagagaacttcccttacctggtagcgtacaagccaccgtgtgcgctagggctcaagcccctcccccatcgtgggaccagatgtggaagtgtttgatccgcctcaaacccaccctccatgggccaacacccctgctatacagactgggcgctgttcaaatgaagtcaccctgacgcacccagtcaccaaatacatcatgacatgcatgtcggctga

SEQ ID NO: 189 - DNA, 4869 bp, Hepatitis C virus
tcgcccacaggacgtcaagttcccgggtggcggtcagatcgttggtggagtttacttgttgccgcgcaggggccctagattgggtgtgcgcgcgacgaggaagacttccgagcggtcgcaacctcgagtagacgtcagcctatccccaaggcgcgtcggcccgagggcaggtcctgggctcagcccgggtacccttggcccctctatggcaatgagggttgcgggtgggcgggatggctcctgtctccccgtggtctcggcctagctggggccccacagacccccggcgtaggtcgcgcaatttgggtaaggtcatcgatacccttacgtgcggcttcgccgacctcatggggtacataccgctcgtcggcgcccctctcggaggcgctgccaggccctggcgcatggcgtcagggttctggaagacggcgtgaactatgcaacagggaatcttcctggttgctctttctctatcttccttctggctctgctctcttgcctgaccgtgcccgcttcagcctacaagtgcgcaactcttcggggctttaccatgtcaccaatgattgccctaactcgagtattgtgtacgaggcggccgatgccattctgcacactccggggtgtgtcccttgtgtttacgagggtaacacctcgaggtgttggtggcggtgacccccacagtggccaccagggacggcaaactccccacgacgcagcttcgacgccacatcgatctgcttgtcgggagtgccaccctctgctcggccctctacgtgggggatctgtgcggtctgtctttcttgtcggccaactgttcaccttctctcccaggcgccaccggacgatgcagaactgcaattgttctatctaccccggccatataacgggccaccgcatggcatgggatatgatgatgaactggtcccctacgtggcattggcggtagctcagctgctccggatcccacaagccatcatggacatgatcgctggtgctcactggggagtcctggcgggcatagcgtatttctccatggtggggaactgggcgaaggtcctgtagtgctgctgctatttgccggcgtcgacgcggagacccacgtcaccgggggagctgccggccgctccacggctgggattgctggtctcttcagcccaggcgccagacagaacatccaactgatcaataccaacggcagtggcacatcaatagcacggccctgaactgcaacgacagcctcaacaccggctggatagcagggctcttctattccaacaaattcaactcttcgggctgtcccgagaggttggccagctgccgacgcctgccgattttgcccagggctggggccccatcagttacgccaacggaagcggccccgacgaacgcccctactgctggcactaccccccaagaccttgtggtattgtgcccgctaagagcgtgtgtggcccggtgtattgcttcctcccagccccgtggtggtgggaacgaccgacaggtcgggcgcgcctacctacaactggggtgaaaatgacacggacgtcttcgtcctcaacaacaccaggccgccgctgggcaattggttcggttgacctggatgaactcaagtggattcaccaaagtgtgcggagcgcccccttgtgtcatcggaggggtgggcaacaacaccttgcgctgccccactgattgcttccgcaaacatccggaagccacatactctcggtgcggctccgtccttggatcacacccaggtgcatggtcgactacccatataggctttggcattatccttgtaccatcaactacaccttattcaaagtcaggatgtacgtgggaggggtcgagcacaggctggaagcgcctgcaactggacgcggggcgaacgctgtgatctggaagacagggacaggtccgagctcagtccgttactgctgtccaccacgcagtggcaggtccttccgtgttcttttacgaccctgccagccttgtccaccggcctctccacctccaccagaacattgtggacgtgcagtacttgtacggggtagggtcaagcatcgcgtcctgggccattaagtgggagtacgtcgttctcctgttccttctgcttgcagacgcgcgcgtctgtcctgcttgtggatgatgttactcatatcccaagcggaggcggctttggagaacctcgtagtactcaatgcagcatccctggccgggacgcacggtcttgtgtccttcctcgtgttcttctgctttgcgtggtatctgaaggtaggtgggcgcccggagcggtctacgccctctacgggatgtggcctctcctcctgctcctgctggcgctgcctcagcgggcatacgcactggacacggaggtggccgcgtcgtgtggcggcgttgtcttgtcgggttgatggcgctgactctgtcaccacattacaagcgcctcatctgctggtgcgtgtggtggcttcagtattttctaaccagagtggaagcgcacctgcacgtgtgggttccccccctcaacgtccgggggggggcgatgccatcatcttactcatgtgtgttatacacccggctctgatatttgacatcaccaaactgctgctggccgtcttcggacccctttggattcttcaagccagtttgctgaaagtcccctacttgtgcgcgttcaaggccttctccgaatctgcgcgctagcgcggaagttagccagaggtcattacgtgcagatggccatcatcaagttaggggcgcttactggcacctatgtctataaccatctcactcctctccgagactggcgcacaacggcctgcaagacctggccgtggctgtagaaccagtcatcttctcccgaatggagaccaaactcatcacgtggggggcagacaccgccgcgtgcggcgacatcatcaacggcttgcccgttccgcccgcaggggccgggagatattgcttggaccagccgacggaatggcctctaaagggtggaggttgctggcgcccatcacagcgtacgcccagcagacgagaggcctcctagggtgcataatcaccagcctgactggcgggataaaaaccaagtggagggtgaggtccagatcgtgtcaactgctacccaaaccttcctggcaacgtgcatcaatggggtatgctggactgtctaccacggggccggaacgaggaccatcgcatccccaggggtcctgttatccagatgtacaccaatgtggaccaggaccttgtgggctggcctgctcctcaaggttcccgctcattgacaccctgcacctgcggctcctcggacctttacctggtcacgaggcacgccgatgtcttcccgtgcgccggcgaggtgatagcaggggcagcttgctctcgccccggcccatttcctacttgaaaggctcctcggggggtccgctgttgtgccccgcgggacacgccgtgggcatatttagggcgcggtgtgcacccgtggtgtggctaaggcggtggacttcatccctgtggagaacctagagacaaccatgagatccccggtgttcacggacaactcttctccaccagcagtgccccagagcttccaggtggctcacctgcatctcccactggcagcggcaagagcaccaaggtcccggctgcgtacgcagctcagggctacaaagtgctagtgctcaacccctctgttgctgcaacattgggctttggtgcttacatgtccaaggctcaggggtcgatcctaatgtcaggacgggggtgcgaacaattaccaccggcagccccatcacgtactccacctacggcaagttccttgccgacggcgggtgctcaggaggtgcttatgacataataatttgtgatgagtgccacccacggatgccacatccatcttgggcatcggcactgtccttgaccaagcagagaccgcgggggcgagactggttgtgctcgccactgctacccctccgggctccgtcaccgtgccccatcctaacatgaggaggttgctctgtccaccaccggagagatccctttttacggcaaggctattcccctcgaggtcatcaaggggggaaggcatctcatcttctgccactcaaagaaaaagtgtgacgagctcgccgcaaagctggtcgcatgggcatcaatgccgtggcctactaccgcggtcttgacgtgtctgtcatcccgaccagcggcgatgttgtcgtcgtggcgaccgatgctctcatgactggctataccggcgacttcgactctgtgatgactgcaacacgtgtgtcacccagacagtcgatttcagccttgaccctaccttcaccattgagacaaccacgctcccccaagacgctgtctcccggactcaacgtcggggcagaaccggcagggggaagccaggcatctacgatttgtggcaccgggggaacgcccctccggcatgttcgactcgtccgtcatctgtgagtgctatgacgcgggctgtgcttggtatgagctcacgcccgccgagactacagttaggctacgagcgtaatgaacaccccggggctccccgtgtgccaggaccatcttgaattttgggagggcgtctttacgggcctcacccatatagatgcccactttctatcccagacaaagcagagtggagagaacttcccttacctggtagcgtacaagccaccgtgtgcgctagggctcaagcccctcccccatcgtgggaccagatgtggaagtgtttgatccgcctcaaacccaccctccatgggccaacacccctgctatacagactgggcgctgttcaaatgaagtcaccctgacgcacccagtcaccaaatacatcatgacatgcatgtcggctga

SEQ ID NO: 190 - DNA, 4869 bp, Hepatitis C virus
tcgcccacaggacgtcaagttcccgggtggcggtcagatcgttggtggagtttacttgttgccgcgcaggggccctagattgggtgtgcgcgcgacgaggaagacttccgagcggtcgcaacctcgagtagacgtcagcctatccccaaggcgcgtcggcccgagggcaggtcctgggctcagcccgggtacccttggcccctctatggcaatgagggttgcgggtgggcgggatggctcctgtctccccgtggtctcggcctagctggggccccacagacccccggcgtaggtcgcgcaatttgggtaaggtcatcgatacccttacgtgcggcttcgccgacctcatggggtacataccgctcgtcggcgcccctctcggaggcgctgccaggccctggcgcatggcgtcagggttctggaagacggcgtgaactatgcaacagggaatcttcctggttgctctttctctatcttccttctggctctgctctcttgcctgaccgtgcccgcttcagcctacaagtgcgcaactcttcggggctttaccatgtcaccaatgattgccctaactcgagtattgtgtacgaggcggccgatgccattctgcacactccggggtgtgtcccttgtgtttacgagggtaacacctcgaggtgttggtggcggtgacccccacagtggccaccagggacggcaaactccccacgacgcagcttcgacgccacatcgatctgcttgtcgggagtgccaccctctgctcggccctctacgtgggggatctgtgcggtctgtctttcttgtcggccaactgttcaccttctctcccaggcgccaccggacgatgcagaactgcaattgttctatctaccccggccatataacgggccaccgcatggcatgggatatgatgatgaactggtcccctacgtggcattggcggtagctcagctgctccggatcccacaagccatcatggacatgatcgctggtgctcactggggagtcctggcgggcatagcgtatttctccatggtggggaactgggcgaaggtcctgtagtgctgctgctatttgccggcgtcgacgcggagacccacgtcaccgggggagctgccggccgctccacggctgggattgctggtctcttcagcccaggcgccagacagaacatccaactgatcaataccaacggcagtggcacatcaatagcacggccctgaactgcaacgacagcctcaacaccggctggatagcagggctcttctattccaacaaattcaactcttcgggctgtcccgagaggttggccagctgccgacgcctgccgattttgcccagggctggggccccatcagttacgccaacggaagcggccccgacgaacgcccctactgctggcactaccccccaagaccttgtggtattgtgcccgctaagagcgtgtgtggcccggtgtattgcttcctcccagccccgtggtggtgggaacgaccgacaggtcgggcgcgcctacctacaactggggtgaaaatgacacggacgtcttcgtcctcaacaacaccaggccgccgctgggcaattggttcggttgacctggatgaactcaagtggattcaccaaagtgtgcggagcgcccccttgtgtcatcggaggggtgggcaacaacaccttgcgctgccccactgattgcttccgcaaacatccggaagccacatactctcggtgcggctccgtccttggatcacacccaggtgcatggtcgactacccatataggctttggcattatccttgtaccatcaactacaccttattcaaagtcaggatgtacgtgggaggggtcgagcacaggctggaagcgcctgcaactggacgcggggcgaacgctgtgatctggaagacagggacaggtccgagctcagtccgttactgctgtccaccacgcagtggcaggtccttccgtgttcttttacgaccctgccagccttgtccaccggcctctccacctccaccagaacattgtggacgtgcagtacttgtacggggtagggtcaagcatcgcgtcctgggccattaagtgggagtacgtcgttctcctgttccttctgcttgcagacgcgcgcgtctgtcctgcttgtggatgatgttactcatatcccaagcggaggcggctttggagaacctcgtagtactcaatgcagcatccctggccgggacgcacggtcttgtgtccttcctcgtgttcttctgctttgcgtggtatctgaaggtaggtgggcgcccggagcggtctacgccctctacgggatgtggcctctcctcctgctcctgctggcgctgcctcagcgggcatacgcactggacacggaggtggccgcgtcgtgtggcggcgttgtcttgtcgggttgatggcgctgactctgtcaccacattacaagcgcctcatctgctggtgcgtgtggtggcttcagtattttctaaccagagtggaagcgcacctgcacgtgtgggttccccccctcaacgtccgggggggggcgatgccatcatcttactcatgtgtgttatacacccggctctgatatttgacatcaccaaactgctgctggccgtcttcggacccctttggattcttcaagccagtttgctgaaagtcccctacttgtgcgcgttcaaggccttctccgaatctgcgcgctagcgcggaagttagccggaggtcattacgtgcagatggccatcatcaagttaggggcgcttactggcacctatgtctataaccatctcactcctctccgagactggcgcacaacggcctgcaagacctggccgtggctgtagaaccagtcatcttctcccgaatggagaccaaactcatcacgtggggggcagacaccgccgcgtgcggcgacatcatcaacggcttgcccgttccgcccgcaggggccgggagatattgcttggaccagccgacggaatggcctctaaagggtggaggttgctggcgcccatcacagcgtacgcccagcagacgagaggcctcctagggtgcataatcaccagcctgactggcgggataaaaaccaagtggagggtgaggtccagatcgtgtcaactgctacccaaaccttcctggcaacgtgcatcaatggggtatgctggactgtctaccacggggccggaacgaggaccatcgcatccccaggggtcctgttatccagatgtacaccaatgtggaccaggaccttgtgggctggcctgctcctcaaggttcccgctcattgacaccctgcacctgcggctcctcggacctttacctggtcacgaggcacgccgatgtcttcccgtgcgccggcgaggtgatagcaggggcagcttgctctcgccccggcccatttcctacttgaaaggctcctcggggggtccgctgttgtgccccgcgggacacgccgtgggcatatttagggcgcggtgtgcacccgtggtgtggctaaggcggtggacttcatccctgtggagaacctagagacaaccatgagatccccggtgttcacggacaactcttctccaccagcagtgccccagagcttccaggtggctcacctgcatctcccactggcagcggcaagagcaccaaggtcccggctgcgtacgcagctcagggctacaaagtgctagtgctcaacccctctgttgctgcaacattgggctttggtgcttacatgtccaaggctcaggggtcgatcctaatgtcaggacgggggtgcgaacaattaccaccggcagccccatcacgtactccacctacggcaagttccttgccgacggcgggtgctcaggaggtgcttatgacataataatttgtgatgagtgccacccacggatgccacatccatcttgggcatcggcactgtccttgaccaagcagagaccgcgggggcgagactggttgtgctcgccactgctacccctccgggctccgtcaccgtgccccatcctaacatgaggaggttgctctgtccaccaccggagagatccctttttacggcaaggctattcccctcgaggtcatcaaggggggaaggcatctcatcttctgccactcaaagaaaaagtgtgacgagctcgccgcaaagctggtcgcatgggcatcaatgccgtggcctactaccgcggtcttgacgtgtctgtcatcccgaccagcggcgatgttgtcgtcgtggcgaccgatgctctcatgactggctataccggcgacttcgactctgtgatgactgcaacacgtgtgtcacccagacagtcgatttcagccttgaccctaccttcaccattgagataaccacgctcccccaagacgctgtctcccggactcaacgtcggggcagaaccggcagggggaagccaggcatctacgatttgtggcaccgggggaacgcccctccggcatgttcgactcgtccgtcatctgtgagtgctatgacgcgggctgtgcttggtatgagctcacgcccgccgagactacagttaggctacgagcgtaatgaacaccccggggctccccgtgtgccaggaccatcttgaattttgggagggcgtctttacgggcctcacccatatagatgcccactttctatcccagacaaagcagagtggagagaacttcccttacctggtagcgtacaagccaccgtgtgcgctagggctcaagcccctcccccatcgtgggaccagatgtggaagtgtttgatccgcctcaaacccaccctccatgggccaacacccctgctatacagactgggcgctgttcaaatgaagtcaccctgacgcacccagtcaccaaatacatcatgacatgcatgtcggctga

SEQ ID NO: 191 - DNA, 4869 bp, Hepatitis C virus
tcgcccacaggacgtcaagttcccgggtggcggtcagatcgttggtggagtttacttgttgccgcgcaggggccctagattgggtgtgcgcgcgacgaggaagacttccgagcggtcgcaacctcgagtagacgtcagcctatccccaaggcgcgtcggcccgagggcaggtcctgggctcagcccgggtacccttggcccctctatggcaatgagggttgcgggtgggcgggatggctcctgtctccccgtggtctcggcctagctggggccccacagacccccggcgtaggtcgcgcaatttgggtaaggtcatcgatacccttacgtgcggcttcgccgacctcatggggtacataccgctcgtcggcgcccctctcggaggcgctgccaggccctggcgcatggcgtcagggttctggaagacggcgtgaactatgcaacagggaatcttcctggttgctctttctctatcttccttctggctctgctctcttgcctgaccgtgcccgcttcagcctacaagtgcgcaactcttcggggctttaccatgtcaccaatgattgccctaactcgagtattgtgtacgaggcggccgatgccattctgcacactccggggtgtgtcccttgtgtttacgagggtaacacctcgaggtgttggtggcggtgacccccacagtggccaccagggacggcaaactccccacgacgcagcttcgacgccacatcgatctgcttgtcgggagtgccaccctctgctcggccctctacgtgggggatctgtgcggtctgtctttcttgtcggccaactgttcaccttctctcccaggcgccaccggacgatgcagaactgcaattgttctatctaccccggccatataacgggccaccgcatggcatgggatatgatgatgaactggtcccctacgtggcattggcggtagctcagctgctccggatcccacaagccatcatggacatgatcgctggtgctcactggggagtcctggcgggcatagcgtatttctccatggtggggaactgggcgaaggtcctgtagtgctgctgctatttgccggcgtcgacgcggagacccacgtcaccgggggagctgccggccgctccacggctgggattgctggtctcttcagcccaggcgccagacagaacatccaactgatcaataccaacggcagtggcacatcaatagcacggccctgaactgcaacgacagcctcaacaccggctggatagcagggctcttctattccaacaaattcaactcttcgggctgtcccgagaggttggccagctgccgacgcctgccgattttgcccagggctggggccccatcagttacgccaacggaagcggccccgacgaacgcccctactgctggcactaccccccaagaccttgtggtattgtgcccgctaagagcgtgtgtggcccggtgtattgcttcctcccagccccgtggtggtgggaacgaccgacaggtcgggcgcgcctacctacaactggggtgaaaatgacacggacgtcttcgtcctcaacaacaccaggccgccgctgggcaattggttcggttgacctggatgaactcaagtggattcaccaaagtgtgcggagcgcccccttgtgtcatcggaggggtgggcaacaacaccttgcgctgccccactgattgcttccgcaaacatccggaagccacatactctcggtgcggctccgtccttggatcacacccaggtgcatggtcgactacccatataggctttggcattatccttgtaccatcaactacaccttattcaaagtcaggatgtacgtgggaggggtcgagcacaggctggaagcgcctgcaactggacgcggggcgaacgctgtgatctggaagacagggacaggtccgagctcagtccgttactgctgtccaccacgcagtggcaggtccttccgtgttcttttacgaccctgccagccttgtccaccggcctctccacctccaccagaacattgtggacgtgcagtacttgtacggggtagggtcaagcatcgcgtcctgggccattaagtgggagtacgtcgttctcctgttccttctgcttgcagacgcgcgcgtctgtcctgcttgtggatgatgttactcatatcccaagcggaggcggctttggagaacctcgtagtactcaatgcagcatccctggccgggacgcacggtcttgtgtccttcctcgtgttcttctgctttgcgtggtatctgaaggtaggtgggcgcccggagcggtctacgccctctacgggatgtggcctctcctcctgctcctgctggcgctgcctcagcgggcatacgcactggacacggaggtggccgcgtcgtgtggcggcgttgtcttgtcgggttgatggcgctgactctgtcaccacattacaagcgcctcatctgctggtgcgtgtggtggcttcagtattttctaaccagagtggaagcgcacctgcacgtgtgggttccccccctcaacgtccgggggggggcgatgccatcatcttactcatgtgtgttatacacccggctctgatatttgacatcaccaaactgctgctggccgtcttcggacccctttggattcttcaagccagtttgctgaaagtcccctacttgtgcgcgttcaaggccttctccgaatctgcgcgctagcgcggaagttagccggaggtcattacgtgcagatggccatcatcaagttaggggcgcttactggcacctatgtctataaccatctcactcctctccgagactggcgcacaacggcctgcaagacctggccgtggctgtagaaccagtcatcttctcccgaatggagaccaaactcatcacgtggggggcagacaccgccgcgtgcggcgacatcatcaacggcttgcccgttccgcccgcaggggccgggagatattgcttggaccagccgacggaatggcctctaaagggtggaggttgctggcgcccatcacagcgtacgcccagcagacgagaggcctcctagggtgcataatcaccagcctgactggcgggataaaaaccaagtggagggtgaggtccagatcgtgtcaactgctacccaaaccttcctggcaacgtgcatcaatggggtatgctggactgtctaccacggggccggaacgaggaccatcgcatccccaggggtcctgttatccagatgtacaccaatgtggaccaggaccttgtgggctggcctgctcctcaaggttcccgctcattgacaccctgcacctgcggctcctcggacctttacctggtcacgaggcacgccgatgtcttcccgtgcgccggcgaggtgatagcaggggcagcttgctctcgccccggcccatttcctacttgaaaggctcctcggggggtccgctgttgtgccccgcgggacacgccgtgggcatatttagggcgcggtgtgcacccgtggtgtggctaaggcggtggacttcatccctgtggagaacctagagacaaccatgagatccccggtgttcacggacaactcttctccaccagcagtgccccagagcttccaggtggctcacctgcatctcccactggcagcggcaagagcaccaaggtcccggctgcgtacgcagctcagggctacaaagtgctagtgctcaacccctctgttgctgcaacattgggctttggtgcttacatgtccaaggctcaggggtcgatcctaatgtcaggacgggggtgcgaacaattaccaccggcagccccatcacgtactccacctacggcaagttccttgccgacggcgggtgctcaggaggtgcttatgacataataatttgtgatgagtgccacccacggatgccacatccatcttgggcatcggcactgtccttgaccaagcagagaccgcgggggcgagactggttgtgctcgccactgctacccctccgggctccgtcaccgtgccccatcctaacatgaggaggttgctctgtccaccaccggagagatccctttttacggcaaggctattcccctcgaggtcatcaaggggggaaggcatctcatcttctgccactcaaagaaaaagtgtgacgagctcgccgcaaagctggtcgcatgggcatcaatgccgtggcctactaccgcggtcttgacgtgtctgtcatcccgaccagcggcgatgttgtcgtcgtggcgaccgatgctctcatgactggctataccggcgacttcgactctgtgatgactgcaacacgtgtgtcacccagacagtcgatttcagccttgaccctaccttcaccattgagacaaccacgctcccccaagacgctgtctcccggactcaacgtcggggcagaaccggcagggggaagccaggcatctacgatttgtggcaccgggggaacgcccctccggcatgttcgactcgtccgtcatctgtgagtgctatgacgcgggctgtgcttggtatgagctcacgcccgccgagactacagttaggctacgagcgtaatgaacgccccggggctccccgtgtgccaggaccatcttgaattttgggagggcgtctttacgggcctcacccatatagatgcccactttctatcccagacaaagcagagtggagagaacttcccttacctggtagcgtacaagccaccgtgtgcgctagggctcaagcccctcccccatcgtgggaccagatgtggaagtgtttgatccgcctcaaacccaccctccatgggccaacacccctgctatacagactgggcgctgttcaaatgaagtcaccctgacgcacccagtcaccaaatacatcatgacatgcatgtcggctga

SEQ ID NO: 192 - DNA, 4841 bp, Hepatitis C virus
ggcggtcagatcgttggtggagtttacttgttgccgcgcaggggccctagattgggtgtgcgcgcgacgaggaagacttccgagcggtcgcaacctcgaggtagacgtcagcctatccccaaggcgctcggcccgagggcaggtcctgggctcagcccgggtacccttggcccctctatggcaatgagggttgcgggtgggcgggatggctcctgtctccccgtggctctcggcctaactggggccccacagaccccggcgtaggtcgcgcaatttgggtaaggtcatcgatacccttacgtgcggcttcgccgacctcatggggtacataccgctcgtcggcgcccctctcggaggcgctgccagggccctggcgcatggcgtcagggttctggagacggcgtgaactatgcaacagggaatcttcctggttgctctttctctatcttccttctggctctgctctcttgcctgaccgtgcccgcttcagcctaccaagtgcgcaactcttcggggctttacatgtcaccaatgattgccctaactcgagtattgtgtacgaggcggccgatgccattctgcacactccggggtgtgtcccttgtgtttacgagggtaacacctcgaggtgttgggtggcggtgacccccacagtggccaccaggacggcaaactccccacgacgcagcttcgacgccacatcgatctgcttgtcgggagtgccaccctctgctcggccctctacgtgggggatctgtgcgggtctgtctttcttgtcggccaactgttcccttctctcccaggcgccaccggacgatgcagaactgcaattgttctatctaccccggccatataacgggccaccgcatggcatgggatatgatgatgaactggtcccctacggtggcattggcggtagctcagctgctccgatcccacaagccatcatggacatgatcgctggtgctcactggggagtcctggcgggcatagcgtatttctccatggtggggaactgggcgaaggtcctggtagtgctgctgctatttgccggcgtcacgcggagacccacgtcaccgggggagctgccggccgctccacggctgggattgctggtctcttcagcccaggcgccagacagaacatccaactgatcaataccaacggcagttggcacatcaatagcacggccctgaactcaacgacagcctcaacaccggctggatagcagggctcttctattccaacaaattcaactcttcgggctgtcccgagaggttggccagctgccgacgccttgccgattttgcccagggctggggcccctcagttacgccaacggaagcggccccgacgaacgcccctactgctggcactaccccccaagaccttgtggtattgtgcccgctaagagcgtgtgtggcccggtgtattgcttcactcccagccccgtggtggtgggaacgacgacaggtcgggcgcgcctacctacaactggggtgaaaatgacacggacgtcttcgtcctcaacaacaccaggccgccgctgggcaattggttcggttgtacctggatgaactcaagtggattcaccaagtgtgcggagcgcccccttgtgtcatcggaggggtgggcaacaacaccttgcgctgccccactgattgcttccgcaaacatccggaagccacatactctcggtgcggctccggtccttggatcacacccaggtgcatggcgactacccatataggctttggcattatccttgtaccatcaactacaccttattcaaagtcaggatgtacgtgggaggggtcgagcacaggctggaagctgcctgcaactggacgcggggcgaacgcgtgatctggaagacagggacaggtccgagctcagtccgttactgctgtccaccacrcagtggcaggtccttccgtgttcttttacgaccctgccagccttgtccaccggcctcatccacctccaccagaacattgtggacggcagtacttgtacggggtagggtcaagcatcgcgtcctgggccattaagtgggagtacgtcgttctcctgttccttctgcttgcagacgcgcgcgtctgctcctgcttgtggatgatgttactcatacccaagcggaggcggctttggagaacctcgtagtactcaatgcagcatccctggccgggacgcacggtcttgtgtccttcctcgtgttcttctgctttgcgtggtatctgaagggtaggtgggcgcccggagcggtctacgcctctacgggatgtggcctctcctcctgctcctgctggcgctgcctcagcgggcatacgcactggacacggaggtggccgcgtcgtgtggcggcgttgttcttgtcgggttgatggcgctgactctgcaccacattacaagcgcctcatctgctggtgcgtgtggtggcttcagtattttctaaccagagtggaagcgcacctgcacgtgtgggttccccccctcaacgtccggggggggcgcgatgccatcatcttactcatgtgtgtatacacccggctctgatatttgacatcaccaaactgctgctggccgtcttcggacccctttggattcttcaagccagtttgctgaaagtcccctacttcgtgcgcgttcaaggccttctccgaatcgcgcgctagcgcggaagttagccggaggtcattacgtgcagatggccatcatcaagttaggggcgcttactggcacctatgtctataaccatctcactcctctccgagactgggcgcacaacggcctgcaagacctggccgggctgtagaaccagtcatcttctcccgaatggagaccaaactcatcacgtggggggcagacaccgccgcgtgcggcgacatcatcaacggcttgcccgtctccgcccgcaggggccgggagatattgttggaccagccgacggaatggcctctaaagggtggaggttgctggcgcccatcacagcgtacgcccagcagacgagaggcctcctagggtgcataatcaccagcctgactggccgggataaaaaccaagtggagggtgaggccagatcgtgtcaactgctacccaaaccttcctggcaacgtgcatcaatggggtatgctggactgtctaccacggggccggaacgaggaccatcgcatcacccaggggtcctgttatccagatgtacccaatgtggaccaggaccttgtgggctggcctgctcctcaaggttcccgctcattgacaccctgcacctgcggctcctcggacctttacctggtcacgaggcacgccgatgtcattcccgtgcgccggcgaggtgatagcagggcagcttgctctcgccccggcccatttcctacttgaaaggctcctcggggggtccgctgttgtgccccgcgggacacgccgtgggcatatttagggccgcggtgtgcacccgtggtgtggctaagcggtggacttcatccctgtggagaacctagagacaaccatgagatccccggtgttcacggacaactcttctccaccagcagtgccccagagcttccaggtggctcacctgcatgctcccactggcagcggcaagagcaccaggtcccggctgcgtacgcagctcagggctacaaagtgctagtgctcaacccctctgttgctgcaacattgggctttggtgcttacatgtccaaggctcatggggtcgatcctaatgtcaggacggggtgcgaacaattaccaccggcagccccatcacgtactccacctacggcaagttccttgccgacggcgggtgctcaggaggtgcttatgacataataatttgtgatgagtgccactccacggatgccacatccatcttgggcacggcactgtccttgaccaagcagagaccgcgggggcgagactggttgtgctcgccactgctacccctccgggctccgtcaccgtgccccatcctaacatcgaggaggttgctctgtccaccaccggaagatccctttttacggcaaggctattcccctcgaggtcatcaaggggggaaggcatctcatcttctgccactcaaagaaaaagtgtgacgagctcgccgcaaagctggtcgcattgggcatcaatgccgtggcctactacccggtcttgacgtgtctgtcatcccgaccagcggcgatgttgtcgtcgtggcgaccgatgctctcatgactggctataccggcgacttcgactctgtgatagactgcaacacgtgtgtcacccagacatcgatttcagccttgaccctaccttcaccattgagacaaccacgctcccccaagacgctgtctcccggactcaacgtcggggcagaaccggcagggggaagccaggcatctacagatttgtggcaccgggggaacgcccctcggcatgttcgactcgtccgtcatctgtgagtgctatgacgcgggctgtgcttggtatgagctcacgcccgccgagactacagttaggctacgagcgtacatgaacaccccggggctccccgtgtgcaggaccatcttgaattttgggagggcgtctttacgggcctcacccatatagatgcccactttctatcccagacaaagcagagtggagagaacttcccttacctggtagcgtaccaagccaccgtgtgcgctagggctcaagccctcccccatcgtgggaccagatgtggaagtgtttgatccgcctcaaacccaccctccatgggccaacacccctgctatacagactgggcgctgttcagaatgaagtcaccctgacgcacccagtcccaaatacatcatgacatgcatgtcggctga

SEQ ID NO: 193 - DNA, 4869 bp, Hepatitis C virus
tcgcccacaggacgtcaagttcccgggtggcggtcagatcgttggtggagtttacttgttgccgcgcaggggccctagattgggtgtgcgcgcgacgaggaagacttccgagcggtcgcaacctcgagtagacgtcagcctatccccaaggcacgtcggcccgagggcaggacctgggctcagcccgggtacccctggcccctctatggcaatgagggctgcgggtgggcgggatggctcctgtctccccgtggtctcggcctaactggggccccacagacccccggcgtaggtcgcgtaatttgggtaaggtcatcgatacccttacatgcggcttcgccgacctcatggggtacataccgctcgtcggcgcccctcttgggggcgctgccaggccctggcgcatggcgtccgggttctggaagacggcgtgaactatgcaacagggaaccttcctggttgctctttctctatcttccttctggctttgctctcttgcctgactgtgcctgcttcagcctacaagtgcgcaactccacggggctttatcatgtcaccaatgattgccctaactcgagtattgtgtacgaggcggacgatgctatcctgcacactccggggtgtgtcccttgcgtccgcgagggtaacggctcgaggtgttggtggcgataacccccacggtggccaccagggacggcaaactccccacagtgcagcttcgacgtcacatcgatctgctcgtcgggagcgctaccctttgttcggccctttacgtgggggacctgtgcggtctgtctttcttgtcggccaactgttcaccttctctcccaggcgccactggacaacgcaggactgcaattgttccatctatcccggccatataacgggtcaccgtatggcatgggacatgatgatgaactggtcccctacgcggcgctggtagtagctcagatgctccggatcccacaagccatcctggacatgatcgctggtgctcactggggagtcctggcgggcatagcgtatttctccatggtggggaactgggcgaaggtcctgtagtgctgctgctatttgccggcgtcgacgcgggaacccacgtcaccgggggcattgccgcccgtaccacgtctagaattgctggtctcttcaacccaggcgcccagcaggacatccagctggttaacaccaacggcagtggcacatcaacagaacggccttgaactgtaacgatagccttcacaccggctggatagcggggcttttctatcgctacaaattcaactcttcaggctgtcccgagaggttggccagctgccgacccctaccgattttgcccagggctggggccctattagttacgccaacggaagcggccccgaccaacgcccctactgctggcactatcccccaaagccttgcggcattgtgcccgcacagagcgtgtgtggcccggtgtattgcttcctcccagccccgtggtggtgggaacgaccgacaaggcgggcgcgcctacctacagatggggtgcaaacgatacggacgtcttcgtccttaacaacaccaggccaccactgggcaattggttcggttgacctggatgaactcaactggatacaccaaagtgtgcggggcgcccccctgcgtcatcggaggggtgggcaacaagaccttgcactgccccaccgattgtttccgcaagcatccggaagccacatactctcggtgcggctccgtccctggattacacccaggtgtctggtcgactatccgtataggctttggcattacccttgtaccatcaactacaccgtgttcaaagtcaggatgtacgtgggaggggtcgagcataggctggaggcgcctgcaactggacgcggggcgaacgttgcaatctggaagacagggacaggtccgagctcagcccgttgctgctgtccaccacacagtggcaagtccttccgtgttccttcacgaccctgccagccttgtccaccggcctctccacctccaccagaacattgtggacgtgcagtacttatacggggtggggtcaagcatcgcgtcctgggccatcaagtgggagtacgtcgttctcctattccttctgcttgcagacgcgcgcgtctgtcctgcttgtggatgatgttactcatatcccaagcggaggcggctttggagaacctcgtagtgctcaatgcagcatctttggccgggacacacggtcttgtgtccctcctcgtgttcttctgctttgcgtggtacctgaaggtaggtgggtgcccggagcggtctacgccctctacgggatgtggcctctcctcctgctcctattggcgttgccccagcgggcatatgcgttggacacggaggtggccgcgtcgtgtggcggcgctgtcttgtcgggttgatggcgctgactctgtcaccatattacaagcgctatgtcagctggtgcttatggtggcttcagtactttctgaccagagcagaagcgcaactgcacgtgtgggttccccctctcgacgtccgagggggggcgacgccgtcatcttactcatgtgtgctgtacgcccggctttggtgtttgacatcaccaagctgctgctggccgtcctcggacccctctggattctccaagccagtttgcttaaagtgccctacttgtgcgcgttcaaggccttctccggatctgcgcgctagcgcggaagatggcggggggtcattacgtgcaaatggtcatcatcaagttgggggcgctcactggcacttatgtgtataaccatctcactcctcttcgggactggcgcacaacggcctgcgagatctggctgtggctgtagagccagtcgtcttctcccgaatggagaccaacctcatcacgtggggggcagacaccgccgcatgcggcgacatcatcaacggcttgcccgttccgcccgcaggggccgggagatactgctcggaccagccgacggaatggtctccaaggggtggaggttgctggcacccatcacggcatacgcccagcagacaaggggcctcctagggtgtataatcaccagcctaaccggcgggacaaaaatcaggtggagggtgaggtccagattgtgtcaactgctgcccaaacctttctggcaacgtgcatcaatggagtatgctggaccgtctaccacggggccggaacgaggaccatcgcatccccaagggtcctgttatccagatgtacaccaatgtagataaagatctcgtgggttggcccgctcctcaaggttcccgttctttggcaccctgcacctgcggctcctcggacctttatctggtcacgaggcacgccgatgtcttcccgtgcgccggcggggtgatagcaggggcagcctgctttcgccccggcccatttcctacttgaaaggctcctcggggggtccgctgttgtgccccgcggggcacgccgtgggcattttcagggcgcggtgtgcacccgtggagtggctaaggcagtggactttatccctgtagagaacctagagacaaccatgaggtccccggtgttcacggacaactcctctccaccagcagtaccccagagcttccaggtggcccacctgcatctcccacaggcagcggcaagagcaccaaggtcccagctgcatacgcagctcagggctataaggtgctagtgctcaacccctctgttgctgcaacactaggcttcggtgcttatatgtccaaggcccagggatcgaccctaacatcaggaccggggtgagaacaattaccactggcagccccatcacgtactccacctacggcaagttccttgccgacggcgggtgctcagggggtgcttatgacataataatctgtgacgagtgccacccacggatgccacgtccatcttaggcatcggcaccgtccttgaccaagcagagaccgcaggggcgaggcttgttgtgctcgccaccgctacccctccgggctccatcactgtgccccatcctaacatgaggaggttgctctgtccaccaccggagagatccccttttatggcaaggctatccccctcgaagtaatcaagggggggaggcatctcatcttctgtcattcaaagaagaagtgtgacgagctcgctgcaaagctggttgcatgggcgtcaatgccgtggcctattaccgcggtcttgacgtgtctgtcatcccgaccagcggcgatgttgtcgtcgtggcaactgatgctctcatgaccggctataccggcgacttcgactcggtgatgactgcaacacgtgtgtcacccagacagtcgatttcagccttgaccccaccttcaccattgagacaaccacgcttccccaggatgctgtctcccgtacacaacggcggggcaggactggcagggggaagccaggcacctacggtttgtggcaccgggggagcgcccctctggcatgttcgactcgtctgtcctctgtgagtgctatgacgcgggctgtgcttggtatgagctcacgcccgccgagaccacagttaggctacgagcgtaatgaacaccccggggcttcccgtgtgccaggaccaccttgaattttgggagggcgtctttacgggccttacccatatagatgcccacttcctatcccagacaaagcagagtggggagaaccttccttacctggtagcgtacaagccaccgtgtgcgctagggctcaagcccctcccccgtcgtgggaccagatgtggaagtgtttagtccgcctcaagcccaccctccatgggccaacacccctgctatacagattgggcgctgttcaaatgaagtcaccctgacacacccaatcacaaaatacatcatgacatgtatgtcggctga

SEQ ID NO: 194 - DNA, 4869 bp, Hepatitis C virus
tcgcccacaggacgtcaagttcccgggtggcggtcagatcgttggtggagtttacttgttgccgcgcaggggccctagattgggtgtgcgcgcgacgaggaagacttccgagcggtcgcaacctcgagtagacgtcagcctatccccaaggcacgtcggcccgagggcaggacctgggctcagcccgggtacccctggcccctctatggcaatgagggctgcgggtgggcgggatggctcctgtctccccgtggtctcggcctaactggggccccacagacccccggcgtaggtcgcgtaatttgggtaaggtcatcgatacccttacatgcggcttcgccgacctcatggggtacataccgctcgtcggcgcccctcttgggggcgctgccaggccctggcgcatggcgtccgggttctggaagacggcgtgaactatgcaacagggaaccttcctggttgctctttctctatcttccttctggctttgctctcttgcctgactgtgcctgcttcagcctacaagtgcgcaactccacggggctttatcatgtcaccaatgattgccctaactcgagtattgtgtacgaggcggacgatgctatcctgcacactccggggtgtgtcccttgcgtccgcgagggtaacggctcgaggtgttggtggcgataacccccacggtggccaccagggacggcaaactccccacagtgcagcttcgacgtcacatcgatctgctcgtcgggagcgctaccctttgttcggccctttacgtgggggacctgtgcggtctgtctttcttgtcggccaactgttcaccttctctcccaggcgccactggacaacgcaggactgcaattgttccatctatcccggccatataacgggtcaccgtatggcatgggacatgatgatgaactggtcccctacgcggcgctggtagtagctcagatgctccggatcccacaagccatcctggacatgatcgctggtgctcactggggagtcctggcgggcatagcgtatttctccatggtggggaactgggcgaaggtcctgtagtgctgctgctatttgccggcgtcgacgcgggaacccacgtcaccgggggcattgccgcccgtaccacgtctagaattgctggtctcttcaacccaggcgcccagcaggacatccagctggttaacaccaacggcagtggcacatcaacagaacggccttgaactgtaacgatagccttcacaccggctggatagcggggcttttctatcgctacaaattcaactcttcaggctgtcccgagaggttggccagctgccgacccctaccgattttgcccagggctggggccctattagttacgccaacggaagcggccccgaccaacgcccctactgctggcactatcccccaaagccttgcggcattgtgcccgcacagagcgtgtgtggcccggtgtattgcttcctcccagccccgtggtggtgggaacgaccgacaaggcgggcgcgcctacctacagatggggtgcaaacgatacggacgtcttcgtccttaacaacaccaggccaccactgggcaattggttcggttgacctggatgaactcaactggatacaccaaagtgtgcggggcgcccccctgcgtcatcggaggggtgggcaacaagaccttgcactgccccaccgattgtttccgcaagcatccggaagccacatactctcggtgcggctccgtccctggattacacccaggtgtctggtcgactatccgtataggctttggcattacccttgtaccatcaactacaccgtgttcaaagtcaggatgtacgtgggaggggtcgagcataggctggaggcgcctgcaactggacgcggggcgaacgttgcaatctggaagacagggacaggtccgagctcagcccgttgctgctgtccaccacacagtggcaagtccttccgtgttccttcacgaccctgccagccttgtccaccggcctctccacctccaccagaacattgtggacgtgcagtacttatacggggtggggtcaagcatcgcgtcctgggccatcaagtgggagtacgtcgttctcctattccttctgctcgcagacgcgcgcgtctgtcctgcttgtggatgatgttactcatatcccaagcggaggcggctttggagaacctcgtagtgctcaatgcagcatctttggccgggacacacggtcttgtgtccctcctcgtgttcttctgctttgcgtggtacctgaaggtaggtgggtgcccggagcggtctacgccctctacgggatgtggcctctcctcctgctcctattggcgttgccccagcgggcatatgcgttggacacggaggtggccgcgtcgtgtggcggcgctgtcttgtcgggttgatggcgctgactctgtcaccatattacaagcgctatgtcagctggtgcttatggtggcttcagtactttctgaccagagcagaagcgcaactgcacgtgtgggttccccctctcgacgtccgagggggggcgacgccgtcatcttactcatgtgtgctgtacgcccggctttggtgtttgacatcaccaagctgctgctggccgtcctcggacccctctggattctccaagccagtttgcttaaagtgccctacttgtgcgcgttcaaggccttctccggatctgcgcgctagcgcggaagatggcggggggtcattacgtgcaaatggtcatcatcaagttgggggcgctcactggcacttatgtgtataaccatctcactcctcttcgggactggcgcacaacggcctgcgagatctggctgtggctgtagagccagtcgtcttctcccgaatggagaccaacctcatcacgtggggggcagacaccgccgcatgcggcgacatcatcaacggcttgcccgttccgcccgcaggggccgggagatactgctcggaccagccgacggaatggtctccaaggggtggaggttgctggcacccatcacggcatacgcccagcagacaaggggcctcctagggtgtataatcaccagcctaaccggcgggacaaaaatcaggtggagggtgaggtccagattgtgtcaactgctgcccaaacctttctggcaacgtgcatcaatggagtatgctggaccgtctaccacggggccggaacgaggaccatcgcatccccaagggtcctgttatccagatgtacaccaatgtagataaagatctcgtgggttggcccgctcctcaaggttcccgttctttggcaccctgcacctgcggctcctcggacctttatctggtcacgaggcacgccgatgtcttcccgtgcgccggcggggtgatagcaggggcagcctgctttcgccccggcccatttcctacttgaaaggctcctcggggggtccgctgttgtgccccgcggggcacgccgtgggcattttcagggcgcggtgtgcacccgtggagtggctaaggcagtggactttatccctgtagagaacctagagacaaccatgaggtccccggtgttcacggacaactcctctccaccagcagtaccccagagcttccaggtggcccacctgcatctcccacaggcagcggcaagagcaccaaggtcccagctgcatacgcagctcagggctataaggtgctagtgctcaacccctctgttgctgcaacactaggcttcggtgcttatatgtccaaggcccagggatcgaccctaacatcaggaccggggtgagaacaattaccactggcagccccatcacgtactccacctacggcaagttccttgccgacggcgggtgctcagggggtgcttatgacataataatctgtgacgagtgccacccacggatgccacgtccatcttaggcatcggcaccgtccttgaccaagcagagaccgcaggggcgaggcttgttgtgctcgccaccgctacccctccgggctccatcactgtgccccatcctaacatgaggaggttgctctgtccaccaccggagagatccccttttatggcaaggctatccccctcgaagtaatcaagggggggaggcatctcatcttctgtcattcaaagaagaagtgtgacgagctcgctgcaaagctggttgcatgggcgtcaatgccgtggcctattaccgcggtcttgacgtgtctgtcatcccgaccagcggcgatgttgtcgtcgtggcaactgatgctctcatgaccggctataccggcgacttcgactcggtgatgactgcaacacgtgtgtcacccagacagtcgatttcagccttgaccccaccttcaccattgagacaaccacgcttccccaggatgctgtctcccgtacacaacggcggggcaggactggcagggggaagccaggcacctacggtttgtggcaccgggggagcgcccctctggcatgttcgactcgtctgtcctctgtgagtgctatgacgcgggctgtgcttggtatgagctcacgcccgccgagaccacagttaggctacgagcgtaatgaacaccccggggcttcccgtgtgccaggaccaccttgaattttgggagggcgtctttacgggccttacccatatagatgcccacttcctatcccagacaaagcagagtggggagaaccttccttacctggtagcgtacaagccaccgtgtgcgctagggctcaagcccctcccccgtcgtgggaccagatgtggaagtgtttagtccgcctcaagcccaccctccatgggccaacacccctgctatacagattgggcgctgttcaaatgaagtcaccctgacacacccaatcacaaaatacatcatgacatgtatgtcggctga

SEQ ID NO: 195 - DNA, 4869 bp, Hepatitis C virus
tcgcccacaggacgtcaagttcccgggtggcggtcagatcgttggtggagtttacttgttgccgcgcaggggccctagattgggtgtgcgcgcgacgaggaagacttccgagcggtcgcaacctcgagcagacgtcagcctatccccaaggcacgtcggcccgagggtaggacctgggctcagcccgggtacccctggcccctctatggcaatgagggctgtgggtgggcgggatggctcctgtctccccgtggtctcggcctagctggggcccctcagacccccggcgtaggtcgcgtaatttgggtaaagtcatcgatacccttacatgcggcttcgccgacctcatggggtacataccgctcgtcggcgcccctcttgggggcgctgccaggccctggcgcatggcgtccgggttctggaagacggcgtgaactatgcaacagggaaccttcctggttgctctttctctatcttcctcctggctttgctctcttgcctgactgtgcctgcttcagcctacaagtgcgcaactccacggggctttatcatgtcaccaatgattgccctaactcgagtattgtgtacgaggcggccgatgctatcctgcacactccggggtgtgtcccttgcgtctacgagggtaacgcctcgaggtgttggtggcgataacccccacggtggccaccagggacggcaaactccccacagtgcagcttcgacgtcacatcgatctgcttgtcgggagcgctaccctttgttcggccctttacgtgggggacctgtgcggtctgtctttcttgtcggccaactgttcaccttctctcccaggctccactggacaacgcaggactgtaattgttccatctaccccggccatataacgggtcaccgtatggcatgggacatgatgatgaactggtcccctacgcggcgctggtagtagctcagatgctccggatcccgcaagccatcttggacatgatcgctggtgctcactggggagtcctagcgggcatagcgtatttctccatggtggggaactgggcgaaggtcctgtagtgctgctgctatttgccggcgtcgacgcggggacccacgtcaccgggggagctgccggccgtaccacggctggatttgctggtctctttacacgaggcgcccagcagagcatccagttggttaacaccaacggcagtggcacatcaacagaacggctttgaactgcaacgatagccttcagaccggctggatagcggggcttctctatcacaacaaattcaactcttcaggctgtcccgagaggttggccagctgccgacccctaccgattttgcccagggctggggccctatcagttacgccaacggaagcggccccgaccaacgcccctactgctggcactaccccccaaagccttgcggcattgtgcccgcacagagcgtatgtggcccggtatattgtttccccctagccccgtggtggtgggaacgaccgacaggtcgggcgcgcctacctacggatggggtgcaaacgatacggacgtcttcgtcctcaacaacaccaggccaccactgggcaattggttcggttgacctggatgaactcaactggatataccaaagtgtgcggggcgcccccctgtttcatcagaggggtgggcaacaacaccttgcactgccccaccgattgcttccgcaagcatccggaagccacatactctcggtgcggctccgtccctggattacacccaggtgcctggtcaactacccgtataggctttggcattacccttgtaccatcaactacaccgtgttcaaggtcaggatgtacgtgggaggggttgagcataggctagaggcgcctgcaactggacgcggggcgaacgttgcagtctggaagacagggacaggtccgagctcagcccgttgctgctgtccaccacacagtggcaggtccttccctgttccttcacgaccctgccagccttgtccactggcctctccacctccaccagaacattgtggacgtgcagtacttatacggggtggggtcaagtatcgcgtcctgggccatcaagtgggagtacgtcgttctcctattccttctgcttgcagacgcgcgcgtctgtcctgcttgtggatgatgttgctcatatcccaagcggaggcggccttggagaacctcgtagtgctcaatgcagcatctttggccgggacgcatgggtttgtgtccttcctcgtgttcttctgctttgcgtggtacctgaaggtaggtgggtgcccggagcagcctacgccctctacgggatgtggcctctcctcctgctcctgttggcgttgccccagcgggcatacgcgttggacacggaggtggccgcgtcgtgtggcggcgctgtcttgtcgggttgatggcgctgactctgtcaccacattacaagcgatatgtcagctggtgcttgtggtggcttcagtactttctgaccagagcagaagcgcaactgcacgtgtgggttccccccctcgacgtccgagggggggcgacgccgtcatcttactcatgtgtgctgtacgcccgactttggtgtttgacatcaccaagctgctgctggccgtcttcgggcccctttggattctccaagccagtttgctcaaagtaccctacttgtgcgcgttcaaggccttctccggatctgcgcgctagcgcggaagatggcggggggtcattacgtgcaaatggtcatcatcaagctaggggcgctcactggcacctatgtttataaccacctcactcctcttcgggactggcgcacaacggcctgcgagatctggctgtggctgtagagccagtcgtcttctcccgaatggagaccaacctcatcacgtggggggcagacaccgccgcgtgcggtgacatcatcaacggcttgcccgttccgcccgtaggggccgggagatactgctcggaccagccgacggaatggtctccaaggggtggaggttgctggcacccatcacggcatatgcccagcagacgaggggcctcctagggtgtataatcaccagcctaaccggcgggacaaaaaccaggtggagggtgaggtccagattgtgtcaactgctgcccaaactttcctggcaacgtgcatcaatggagtatgctggaccgtctaccacggggccgggacgaggaccatcgcatccccaagggtcctgtcatccagatgtacaccaatgtagacaaagatcttgtgggctggcccgctccccaaggttcccgttcattgacaccctgcacctgcggctcctcggacctttatctggtcacgaggcacgccgatgtcttcccgtgcgccggcggggtgatagcaggggcagcctgctttcgccccggcccatttcctacttgaaaggctcctcggggggtccgctgttgtgccccgcggggcatgctgtgggcatattcagggcgcagtgtgcacccgtggagtggctaaggcggtggactttatccctgtagagaacctagagacaaccatgaggtccccggtgttcacggacaactcctctccaccggcagtaccccagagcttccaggtggcccacctgcatctcccacaggcagcggcaagagcaccaaggtcccggctgcatacgcagctcagggctataaggtgctagtgctcaacccctctgttgctgcaacactaggcttcggtgtttatatgtccaaggcccagggatcgatcctaacatcaggaccggggtgagaacaattaccactggcagccccatcacgtactccacctacggcaagttccttgccgacggcgggtgctcagggggtgcttatgacataataatctgtgacgagtgccacccacggatgccacatctatcttaggcatcggcaccgtccttgaccaagcagagaccgcgggggcgaggcttgttgtgctcgccaccgctacccctccgggctccgtcaccgtgccccatcctaacatgaggaggttgctctgtccaccaccggagagatccctttttatggcaaggctatccccctcgaagtaatcaagggggggaggcatctcatcttctgtcattcaaagaagaagtgtgacgagctcgccgcaaagctggttgcatgggcgtcaatgccgtggcctattaccgcggccttgacgtgtctgtcatcccgaccagcggcgatgttgtcgtcgtggcaactgatgctctcatgaccggctataccggcgacttcgactcggtgatgactgcaacacgtgtgtcacccagacagttgatttcagccttgaccccaccttcaccattgagacaaccacgcttccccaggatgctgtctcccgtacacaacgtcggggcaggactggcagagggaagccaggcacctacgatttgtggcaccgggggagcgcccctccggcatgttcgactcgtctgtcctctgtgagtgctatgacgcgggctgtgcttggtatgagctcacgcccgccgagactacagttaggctacgagcgtaatgaacaccccgggacttcccgtgtgccaggaccaccttgaattttgggagggcgtctttacgggccttactcatatagatgcccacttcctatcccagacaaagcagagcggggagaaccttccttacctggtagcgtacaagccaccgtgtgcgctagggctcaagcccctcccccatcgtgggaccagatgtggaagtgcttggtccgcctcaagcccaccctccatggaccaacacccctgctatacagattgggcgctgttcaaatgagatcaccctgacacacccaatcacaaaatacatcatgacatgtatgtcggctga

SEQ ID NO: 196 - DNA, 4869 bp, Hepatitis C virus; identical to SEQ ID NO: 194

SEQ ID NO: 197 - DNA, 4869 bp, Hepatitis C virus; identical to SEQ ID NO: 194

SEQ ID NO: 198 - DNA, 5221 bp, Hepatitis C virus
tcactcccctgtgaggaactactgtcttcacgcagaaagcgtctagccatggcgttagtatgagtgtcgtgcagcctccaggaccccccctcccgggagagccatagtggtctgcggaaccggtgagacaccggaattgccaggacgaccgggtcctttcttggataaacccgctcaatgcctggagatttgggcgtgcccccgcaagactgctagccgagtagtgttgggtcgcgaaaggccttgtggtactgctgatagggtgcttgcgagtgccccgggaggtctcgtagaccgtgcaccatgagcacgaatcctaaacctcaaagaaaaaccaaacgtaacaccaaccgtcgcccacaggacgtcaagttcccgggtggcggtcagatcgtggtggagtttacttgttgccgcgcaggggccctagattgggtgtgcgcgcgacgaggaagacttccgagcggtcgcaacctcgaggtagacgtcagcctatccccaaggcacgtcggcccgagggcagacctgggctcagcccgggtacccctggcccctctatggcaatgagggctgcgggtgggcgggatggctcctgtctccccgtggctctcggcctaactggggccccacagacccccggcgtaggtcgcgtaatttgggtaagtcatcgatacccttacatgcggcttcgccgacctcatggggtacataccgctcgtcggcgcccctcttgggggcgctgccagggccctggcgcatggcgtccgggttctggaagacggcgtgaacttgcaacagggaaccttcctggttgctctttctctatcttccttctggctttgctctcttgcctgactgtgcctgcttcagcctaccaagtgcgcaactccacggggctttatcatgtcaccaatgattgccctaactcgagattgtgtacgaggcggacgatgctatcctgcacactccggggtgtgtcccttgcgtccgcgagggtaacggctcgaggtgttgggtggcgataacccccacggtggccaccagggacggcaaactcccacagtgcagcttcgacgtcacatcgatctgctcgtcgggagcgctaccctttgttcggccctttacgtgggggacctgtgcgggtctgtctttcttgtcggccaactgttcaccttctctcccaggcgccactggacaaccaggactgcaattgttccatctatcccggccatataacgggtcaccgtatggcatgggacatgatgatgaactggtcccctacgacggcgctggtagtagctcagatgctccggatcccacaagccacctggacatgatcgctggtgctcactggggagtcctggcgggcatagcgtatttctccatggtggggaactgggcgaaggtcctggtagtgctgctgctatttgccggcgtcgacgcgggaacccacgtcaccgggggcatgccgcccgtaccacgtctagaattgctggtctcttcaacccaggcgcccagcaggacatccagctggttaacaccaacggcagttggcacatcaacagaacggccttgaactgtaacgatagccttccaccggctggatagcggggcttttctatcgctacaaattcaactcttcaggctgtcccgagaggttggccagctgccgaccccttaccgattttgcccagggctggggccctattagttacgccaacggaagcggccccgacaacgcccctactgctggcactatcccccaaagccttgcggcattgtgcccgcacagagcgtgtgtggcccggtgtattgcttcactcccagccccgtggtggtgggaacgaccgacaatgcgggcggcctacctacagatggggtgcaaacgatacggacgtcttcgtccttaacaacaccaggccaccactgggcaattggttcggttgcacctggatgaactcaactggatacaccaaagtgtgcggggcgcccccctgcgtcatggaggggtgggcaacaagaccttgcactgccccaccgattgtttccgcaagcatccggaagccacatactctcggtgcggctccggtccctggattacacccaggtgtctggtcgactatccgtatagctttggcattacccttgtaccatcaactacaccgtgttcaaagtcaggatgtacgtgggaggggtcgagcataggctggaggctgcctgcaactggacgcggggcgaacgttgcaatctggaagacagggacaggtccgactcagcccgttgctgctgtccaccacacagtggcaagtccttccgtgttccttcacgaccctgccagccttgtccaccggcctcatccacctccaccagaacattgtggacgtgcagtacttatacgggtggggtcaagcatcgcgtcctgggccatcaagtgggagtacgtcgttctcctattccttctgctcgcagacgcgcgcgtctgctcctgcttgtggatgatgttactcatatcccaagcggaggcggctttggagaacctgtagtgctcaatgcagcatctttggccgggacacacggtcttgtgtccctcctcgtgttcttctgctttgcgtggtacctgaagggtaggtgggtgcccggagcggtctacgccctctacgggatgtgcctctcctcctgctcctattggcgttgccccagcgggcatatgcgttggacacggaggtggccgcgtcgtgtggcggcgctgttcttgtcgggttgatggcactgactctgtcaccatattacaagcgctatgtcagctgtgcttatggtggcttcagtactttctgaccagagcagaagcgcaactgcacgtgtgggttccccctctcgacgtccgaggggggcgcgacgccgtcatcttactcatgtgtgctgtacgcccggcttggtgtttgacatcaccaagctgctgctggccgtcctcggacccctctggattctccaagccagcttgcttaaagtgccctactttgtgcgcgttcaaggccttctccggatctgcgcgctagcgcggaagatggcggggggcattacgtgcaaatggtcatcatcaagttgggggcgctcactggcacttatgtgtataaccatctcactcctcttcgggactgggcgcacaacggcctgcgagatctggctgtggctgtagagccagcgtcttctcccgaatggagaccaacctcatcacgtggggggcagacaccgccgcatgcggcgacatcatcaacggcttgcccgtctccgcccgcaggggccgggagatactgctcggaccagccgacggaatggtctccaagggtggaggttgctggcacccatcacggcatacgcccagcagacaaggggcctcctagggtgtataatcaccagcctaaccggccgggacaaaaatcaggtggagggtgaggtccagattgtgtcaatgctgcccaaacctttctggcaacgtgcatcaatggagtatgctggaccgtctaccacggggccggaacgaggaccatcgcatcacccaagggtcctgttatccagatgtacaccaatgtagataaagatctcgtgggttgcccgctcctcaaggttcccgttctttggcaccctgcacctgcggctcctcggacctttatctggtcacgaggcacgccgatgtcattcccgtgcgccggcggggtgatagcaggggcagcctgctttgccccggcccatttcctacttgaaaggctcctcggggggtccgctgttgtgccccgcggggcacgccgtgggcattttcagggccgcggtgtgcacccgtggagtggctaaggcagtggactttatccctgtagagaacctgagacaaccatgaggtccccggtgttcacggacaactcctctccaccagcagtaccccagagcttccaggtggcccacctgcatgctcccacaggcagcggcaagagcaccaaggtcccagctgcatcgcagctcagggctataaggtgctagtgctcaacccctctgttgctgcaacactaggcttcggtgcttatatgtccaaggcccatgggatcgaccctaacatcaggaccggggtgagaacaattaccactggcagccccatacgtactccacctacggcaagttccttgccgacggcgggtgctcagggggtgcttatgacataataatctgtgacgagtgccactccacggatgccacgtccatcttaggcatcggcaccgtccttgccaagcagagaccgcaggggcgaggcttgttgtgctcgccaccgctacccctccgggctccatcactgtgccccatcctaacatcgaggaggttgctctgtccaccaccggagagatccccttttatggcaaggctatcccctcgaagtaatcaagggggggaggcatctcatcttctgtcattcaaagaagaagtgtgacgagctcgctgcaaagctggttgcattgggcgtcaatgccgtggcctattaccgcggtcttgacgtgttgtcatcccgaccagcggcgatgttgtcgtcgtggcaactgatgctctcatgaccggctataccggcgacttcgactcggtgatagactgcaacacgtgtgtcacccagacagtcgatttcagccttgaccccaccttcacattgagacaaccacgcttccccaggatgctgtctcccgtacacaacggcggggcaggactggcagggggaagccaggcacctacaggtttgtggcaccgggggagcgcccctctggcatgttcgactgtctgtcctctgtgagtgctatgacgcgggctgtgcttggtatgagctcacgcccgccgagaccacagttaggctacgagcgtacatgaacaccccggggcttcccgtgtgccaggaccaccttgaattttgggagggcgttttacgggccttacccatatagatgcccacttcctatcccagacaaagcagagtggggagaaccttccttacctggtagcgtaccaagccaccgtgtgcgctagggctcaagcccctcccccgtcgtggaccagatgtggaagtgtttagtccgcctcaagcccaccctccatgggccaacacccctgctatacagattgggcgctgttcagaatgaagtcaccctgacacacccaatcacaaaatacatcatgacatgtatgtcggcga

SEQ ID NO: 199 - DNA, 5221 bp, Hepatitis C virus
tcactcccctgtgaggaactactgtcttcacgcagaaagcgtctagccatggcgttagtatgagtgtcgtgcagcctccaggaccccccctcccgggagagccatagtggtctgcggaaccggtgagacaccggaattgccaggacgaccgggtcctttcttggataaacccgctcaatgcctggagatttgggcgtgcccccgcaagactgctagccgagtagtgttgggtcgcgaaaggccttgtggtactgctgatagggtgcttgcgagtgccccgggaggtctcgtagaccgtgcaccatgagcacgaatcctaaacctcaaagaaaagccaaacgtaacaccaaccgtcgcccacaggacgtcaagttcccgggtggcggtcagatcgtggtggagtttacttgttgccgcgcaggggccctagattgggtgtgcgcgcgacgaggaagacttccgagcggtcgcaacctcgaggtagacgtcagcctatccccaaggcacgtcggcccgagggcagacctgggctcagcccgggtacccctggcccctctatggcaatgagggctgcgggtgggcgggatggctcctgtctccccgtggctctcggcctaactggggccccacagacccccggcgtaggtcgcgtaatttgggtaagtcatcgatacccttacatgcggcttcgccgacctcatggggtacataccgctcgtcggcgcccctcttgggggcgctgccagggccctggcgcatggcgtccgggttctggaagacggcgtgaacttgcaacagggaaccttcctggttgctctttctctatcttccttctggctttgctctcttgcctgactgtgcctgcttcagcctaccaagtgcgcaactccacggggctttatcatgtcaccaatgattgccctaactcgagattgtgtacgaggcggacgatgctatcctgcacactccggggtgtgtcccttgcgtccgcgagggtaacggctcgaggtgttgggtggcgataacccccacggtggccaccagggacggcaaactcccacagtgcagcttcgacgtcacatcgatctgctcgtcgggagcgctaccctttgttcggccctttacgtgggggacctgtgcgggtctgtctttcttgtcggccaactgttcaccttctctcccaggcgccactggacaaccaggactgcaattgttccatctatcccggccatataacgggtcaccgtatggcatgggacatgatgatgaactggtcccctacgacggcgctggtagtagctcagatgctccggatcccacaagccacctggacatgatcgctggtgctcactggggagtcctggcgggcatagcgtatttctccatggtggggaactgggcgaaggtcctggtagtgctgctgctatttgccggcgtcgacgcgggaacccacgtcaccgggggcatgccgcccgtaccacgtctagaattgctggtctcttcaacccaggcgcccagcaggacatccagctggttaacaccaacggcagttggcacatcaacagaacggccttgaactgtaacgatagccttccaccggctggatagcggggcttttctatcgctacaaattcaactcttcaggctgtcccgagaggttggccagctgccgaccccttaccgattttgcccagggctggggccctattagttacgccaacggaagcggccccgacaacgcccctactgctggcactatcccccaaagccttgcggcattgtgcccgcacagagcgtgtgtggcccggtgtattgcttcactcccagccccgtggtggtgggaacgaccgacaaggcgggcggcctacctacagatggggtgcaaacgatacggacgtcttcgtccttaacaacaccaggccaccactgggcaattggttcggttgcacctggatgaactcaactggatacaccaaagtgtgcggggcgcccccctgcgtcatggaggggtgggcaacaagaccttgcactgccccaccgattgtttccgcaagcatccggaagccacatactctcggtgcggctccggtccctggattacacccaggtgtctggtcgactatccgtatagctttggcattacccttgtaccatcaactacaccgtgttcaaagtcaggatgtacgtgggaggggtcgagcataggctggaggctgcctgcaactggacgcggggcgaacgttgcaatctggaagacagggacaggtccgactcagcccgttgctgctgtccaccacacagtggcaagtccttccgtgttccttcacgaccctgccagccttgtccaccggcctcatccacctccaccagaacattgtggacgtgcagtacttatacgggtggggtcaagcatcgcgtcctgggccatcaagtgggagtacgtcgttctcctattccttctgctcgcagacgcgcgcgtctgctcctgcttgtggatgatgttactcatatcccaagcggaggcggctttggagaacctgtagtgctcaatgcagcatctttggccgggacacacggtcttgtgtccctcctcgtgttcttctgctttgcgtggtacctgaagggtaggtgggtgcccggagcggtctacgccctctacgggatgtgcctctcctcctgctcctattggcgttgccccagcgggcatatgcgttggacacggaggtggccgcgtcgtgtggcggcgctgttcttgtcgggttgatggcgctgactctgtcaccatattacaagcgctatgtcagctgtgcttatggtggcttcagtactttctgaccagagcagaagcgcaactgcacgtgtgggttccccctctcgacgtccgaggggggcgcgacgccgtcatcttactcatgtgtgctgtacgcccggcttggtgtttgacatcaccaagctgctgctggccgtcctcggacccctctggattctccaagccagtttgcttaaagtgccctactttgtgcgcgttcaaggccttctccggatctgcgcgctagcgcggaagatggcggggggcattacgtgcaaatggtcatcatcaagttgggggcgctcactggcacttatgtgtataaccatctcactcctcttcgggactgggcgcacaacggcctgcgagatctggctgtggctgtagagccagcgtcttctcccgaatggagaccaacctcatcacgtggggggcagacaccgccgcatgcggcgacatcatcaacggcttgcccgtctccgcccgcaggggccgggagatactgctcggaccagccgacggaatggtctccaagggtggaggttgctggcacccatcacggcatacgcccagcagacaaggggcctcctagggtgtataatcaccagcctaaccggccgggacaaaaatcaggtggagggtgaggtccagattgtgtcaatgctgcccaaacctttctggcaacgtgcatcaatggagtatgctggaccgtctaccacggggccggaacgaggaccatcgcatcacccaagggtcctgttatccagatgtacaccaatgtagataaagatctcgtgggttgcccgctcctcaaggttcccgttctttggcaccctgcacctgcggctcctcggacctttatctggtcacgaggcacgccgatgtcattcccgtgcgccggcggggtgatagcaggggcagcctgctttgccccggcccatttcctacttgaaaggctcctcggggggtccgctgttgtgccccgcggggcacgccgtgggcattttcagggccgcggtgtgcacccgtggagtggctaaggcagtggactttatccctgtagagaacctgagacaaccatgaggtccccggtgttcacggacaactcctctccaccagcagtaccccagagcttccaggtggcccacctgcatgctcccacgggcagcggcaagagcaccaaggtcccagctgcatcgcagctcagggctataaggtgctagtgctcaacccctctgttgctgcaacactaggcttcggtgcttatatgtccaaggcccatgggatcgaccctaacatcaggaccggggtgagaacaattaccactggcagccccatacgtactccacctacggcaagttccttgccgacggcgggtgctcagggggtgcttatgacataataatctgtgacgagtgccactccacggatgccacgtccatcttaggcatcggcaccgtccttgccaagcagagaccgcaggggcgaggcttgttgtgctcgccaccgctacccctccgggctccatcactgtgccccatcctaacatcgaggaggttgctctgtccaccaccggagagatccccttttatggcaaggctatcccctcgaagtaatcaagggggggaggcatctcatcttctgtcattcaaagaagaagtgtgacgagctcgctgcaaagctggttgcattgggcgtcaatgccgtggcctattaccgcggtcttgacgtgttgtcatcccgaccagcggcgatgttgtcgtcgtggcaactgatgctctcatgaccggctataccggcgacttcgactcggtgatagactgcaacacgtgtgtcacccagacagtcgatttcagccttgaccccaccttcacattgagacaaccacgcttccccaggatgctgtctcccgtacacaacggcggggcaggactggcagggggaagccaggcacctacaggtttgtggcaccgggggagcgcccctctggcatgttcgactgtctgtcctctgtgagtgctatgacgcgggctgtgcttggtatgagctcacgcccgccgagaccacagttaggctacgagcgtacatgaacaccccggggcttcccgtgtgccaggaccaccttgaattttgggagggcgttttacgggccttacccatatagatgcccacttcctatcccagacaaagcagagtggggagaaccttccttacctggtagcgtaccaagccaccgtgtgcgctagggctcaagcccctcccccgtcgtggaccagatgtggaagtgtttagtccgcctcaagcccaccctccatgggccaacacccctgctatacagattgggcgctgttcagaatgaagtcaccctgacacacccaatcacaaaatacatcatgacatgtatgtcggcga

SEQ ID NO: 200 - DNA, 5221 bp, Hepatitis C virus
tcactcccctgtgaggaactactgtcttcacgcagaaagcgtctagccatggcgttagtatgagtgtcgtgcagcctccaggaccccccctcccgggagagccatagtggtctgcggaaccggtgagacaccggaattgccaggacgaccgggtcctttcttggataaacccgctcaatgcctggagatttgggcgtgcccccgcaagactgctagccgagtagtgttgggtcgcgaaaggccttgtggtactgctgatagggtgcttgcgagtgccccgggaggtctcgtagaccgtgcaccatgagcacgaatcctaaacctcaaagaaaaaccaaacgtaacaccaaccgtcgcccacaggacgtcaagttcccgggtggcggtcagatcgtggtggagtttacttgttgccgcgcaggggccctagattgggtgtgcgcgcgacgaggaagacttccgagcggtcgcaacctcgaggtagacgtcagcctatccccaaggcacgtcggcccgagggcagacctgggctcagcccgggtacccctggcccctctatggcaatgagggctgcgggtgggcgggatggctcctgtctccccgtggctctcggcctaactggggccccacagacccccggcgtaggtcgcgtaatttgggtaagtcatcgatacccttacatgcggcttcgccgacctcatggggtacataccgctcgtcggcgcccctcttgggggcgctgccagggccctggcgcatggcgtccgggttctggaagacggcgtgaacttgcaacagggaaccttcctggttgctctttctctatcttccttctggctttgctctcttgcctgactgtgcctgcttcagcctaccaagtgcgcaactccacggggctttatcatgtcaccaatgattgccctaactcgagattgtgtacgaggcggacgatgctatcctgcacactccggggtgtgtcccttgcgtccgcgagggtaacggctcgaggtgttgggtggcgataacccccacggtggtcaccagggacggcaaactcccacagtgcagcttcgacgtcacatcgatctgctcgtcgggagcgctaccctttgttcggccctttacgtgggggacctgtgcgggtctgtctttcttgtcggccaactgttcaccttctctcccaggcgccactggacaaccaggactgcaattgttccatctatcccggccatataacgggtcaccgtatggcatgggacatgatgatgaactggtcccctacgacggcgctggtagtagctcagatgctccggatcccacaagccacctggacatgatcgctggtgctcactggggagtcctggcgggcatagcgtatttctccatggtggggaactgggcgaaggtcctggtagtgctgctgctatttgccggcgtcgacgcgggaacccacgtcaccgggggcatgccgcccgtaccacgtctagaattgctggtctcttcaacccaggcgcccagcaggacatccagctggttaacaccaacggcagttggcacatcaacagaacggccttgaactgtaacgatagccttccaccggctggatagcggggcttttctatcgctacaaattcaactcttcaggctgtcccgagaggttggccagctgccgaccccttaccgattttgcccagggctggggccctattagttacgccaacggaagcggccccgacaacgcccctactgctggcactatcccccaaagccttgcggcattgtgcccgcacagagcgtgtgtggcccggtgtattgcttcactcccagccccgtggtggtgggaacgaccgacaaggcgggcggcctacctacagatggggtgcaaacgatacggacgtcttcgtccttaacaacaccaggccaccactgggcaattggttcggttgcacctggatgaactcaactggatacaccaaagtgtgcggggcgcccccctgcgtcatggaggggtgggcaacaagaccttgcactgccccaccgattgtttccgcaagcatccggaagccacatactctcggtgcggctccggtccctggattacacccaggtgtctggtcgactatccgtatagctttggcattacccttgtaccatcaactacaccgtgttcaaagtcaggatgtacgtgggaggggtcgagcataggctggaggctgcctgcaactggacgcggggcgaacattgcaatctggaagacagggacaggtccgactcagcccgttgctgctgtccaccacacagtggcaagtccttccgtgttccttcacgaccctgccagccttgtccaccggcctcatccacctccaccagaacattgtggacgtgcagtacttatacgggtggggtcaagcatcgcgtcctgggccatcaagtgggagtacgtcgttctcctattccttctgctcgcagacgcgcgcgtctgctcctgcttgtggatgatgttactcatatcccaagcggaggcggctttggagaacctgtagtgctcaatgcagcatctttggccgggacacacggtcttgtgtccctcctcgtgttcttctgctttgcgtggtacctgaagggtaggtgggtgcccggagcggtctacgccctctacgggatgtgcctctcctcctgctcctattggcgttgccccagcgggcatatgcgttggacacggaggtggccgcgtcgtgtggcggcgctgttcttgtcgggttgatggcgctgactctgtcaccatattacaagcgctatgtcagctgtgcttatggtggcttcagtactttctgaccagagcagaagcgcaactgcacgtgtgggttccccctctcgacgtccgaggggggcgcgacgccgtcatcttactcatgtgtgctgtacgcccggcttggtgtttgacatcaccaagctgctgctggccgtcctcggacccctctggattctccaagccagtttgcttaaagtgccctactttgtgcgcgttcaaggccttctccggatatgcgcgctagcgcggaagatggcggggggcattacgtgcaaatggtcatcatcaagttgggggcgctcactggcacttatgtgtataaccatctcactcctcttcgggactgggcgcacaacggcctgcgagatctggctgtggctgtagagccagcgtcttctcccgaatggagaccaacctcatcacgtggggggcagacaccgccgcatgcggcgacatcatcaacggcttgcccgtctccgcccgcaggggccgggagatactgctcggaccagccgacggaatggtctccaagggtggaggttgctggcacccatcacggcatacgcccagcagacaaggggcctcctagggtgtataatcaccagcctaaccggccgggacaaaaatcaggtggagggtgaggtccagattgtgtcaatgctgcccaaacctttctggcaacgtgcatcaatggagtatgctggaccgtctaccacggggccggaacgaggaccatcgcatcacccaagggtcctgttatccagatgtacaccaatgtagataaagatctcgtgggttgcccgctcctcaaggttcccgttctttggcaccctgcacctgcggctcctcggacctttatctggtcacgaggcacgccgatgtcattcccgtgcgccggcggggtgatagcaggggcagcctgctttgccccggcccatttcctacttgaaaggctcctcggggggtccgctgttgtgccccgcggggcacgccgtgggcattttcagggccgcggtgtgcacccgtggagtggctaaggcagtggactttatccctgtagagaacctgagacaaccatgaggtccccggtgttcacggacaactcctctccaccagcagtaccccagagcttccaggtggcccacctgcatgctcccacaggcagcggcaagagcaccaaggtcccagctgcatcgcagctcagggctataaggtgctagtgctcaacccctctgttgctgcaacactaggcttcggtgcttatatgtccaaggcccatgggatcgaccctaacatcaggaccggggtgagaacaattaccactggcagccccatacgtactccacctacggcaagttccttgccgacggcgggtgctcagggggtgcttatgacataataatctgtgacgagtgccactccacggatgccacgtccatcttaggcatcggcaccgtccttgccaagcagagaccgcaggggcgaggcttgttgtgctcgccaccgctacccctccgggctccatcactgtgccccatcctaacatcgaggaggttgctctgtccaccaccggagagatccccttttatggcaaggctatcccctcgaagtaatcaagggggggaggcatctcatcttctgtcattcaaagaagaagtgtgacgagctcgctgcaaagctggttgcattgggcgtcaatgccgtggcctattaccgcggtcttgacgtgttgtcatcccgaccagcggcgatgttgtcgtcgtggcaactgatgctctcatgaccggctataccggcgacttcgactcggtgatagactgcaacacgtgtgtcacccagacagtcgatttcagccttgaccccaccttcacattgagacaaccacgcttccccaggatgctgtctcccgtacacaacggcggggcaggactggcagggggaagccaggcacctacaggtttgtggcaccgggggagcgcccctctggcatgttcgactgtctgtcctctgtgagtgctatgacgcgggctgtgcttggtatgagctcacgcccgccgagaccacagttaggctacgagcgtacatgaacaccccggggcttcccgtgtgccaggaccaccttgaattttgggagggcgttttacgggccttacccatataaatgcccacttcctatcccagacaaagcagagtggggagaaccttccttacctggtagcgtaccaagccaccgtgtgcgctagggctcaagcccctcccccgtcgtggaccagatgtggaagtgtttagtccgcctcaagcccaccctccatgggccaacacccctgctatacagattgggcgctgttcagaatgaagtcaccctgacacacccaatcacaaaatacatcatgacatgtatgtcggcga

SEQ ID NO: 201 - DNA, 5221 bp, Hepatitis C virus
tcactcccctgtgaggaactactgtcttcacgcagaaagcgtctagccatggcgttagtatgagtgtcgtgcagcctccaggaccccccctcccgggagagccatagtggtctgcggaaccggtgagacaccggaattgccaggacgaccgggtcctttcttggataaacccgctcaatgcctggagatttgggcgtgcccccgcaagactgctagccgagtagtgttgggtcgcgaaaggccttgtggtactgctgatagggtgcttgcgagtgccccgggaggtctcgtagaccgtgcaccatgagcacgaatcctaaacctcaaagaaaaaccaaacgtaacaccaaccgtcgcccacaggacgtcaagttcccgggtggcggtcagatcgtggtggagtttacttgttgccgcgcaggggccctagattgggtgtgcgcgcgacgaggaagacttccgagcggtcgcaacctcgaggtagacgtcagcctatccccaaggcacgtcggcccgagggcagacctgggctcagcccgggtacccctggcccctctatggcaatgagggctgcgggtgggcgggatggctcctgtctccccgtggctctcggcctaactggggccccacagacccccggcgtaggtcgcgtaatttgggtaagtcatcgatacccttacatgcggcttcgccgacctcatggggtacataccgctcgtcggcgcccctcttgggggcgctgccagggccctggcgcatggcgtccgggttctggaagacggcgtgaacttgcaacagggaaccttcctggttgctctttctctatcttccttctggctttgctctcttgcctgactgtgcctgcttcagcctaccaagtgcgcaactccacggggctttatcatgtcaccaatgattgccctaactcgagattgtgtacgaggcggacgatgctatcctgcacactccggggtgtgtcccttgcgtccgcgagggtaacggctcgaggtgttgggtggcgataacccccacggtggccaccagggacggcaaactcccacagtgcagcttcgacgtcacatcgatctgctcgtcgggagcgctaccctttgttcggccctttacgtgggggacctgtgcgggtctgtctttcttgtcggccaactgttcaccttctctcccaggcgccactggacaaccaggactgcaattgttccatctatcccggccatataacgggtcaccgtatggcatgggacatgatgatgaactggtcccctacgacggcgctggtagtagctcagatgctccggatcccacaagccacctggacatgatcgctggtgctcactggggagtcctggcgggcatagcgtatttctccatggtggggaactgggcgaaggtcctggtagtgctgctgctatttgccggcgtcgacgcgggaacccacgtcaccgggggcatgccgcccgtaccacgtctagaattgctggtctcttcaacccaggcgcccagcaggacatccagctggttaacaccaacggcagttggcacatcaacagaacggccttgaactgtaacgatagccttccaccggctggatagcggggcttttctatcgctacaaattcaactcttcaggctgtcccgagaggttggccagctgccgaccccttaccgattttgcccagggctggggccctattagttacgccaacggaagcggccccgacaacgcccctactgctggcactatcccccaaagccttgcggcattgtgcccgcacagagcgtgtgtggcccggtgtattgcttcactcccagccccgtggtggtgggaacgaccgacaaggcgggcggcctacctacagatggggtgcaaacgatacggacgtcttcgtccttaacaacaccaggccaccactgggcaattggttcggttgcacctggatgaactcaactggatacaccaaagtgtgcggggcgcccccctgcgtcatggaggggtgggcaacaagaccttgcactgccccaccgattgtttccgcaagcatccggaagccacatactctcggtgcggctccggtccctggattacacccaggtgtctggtcgactatccgtatagctttggcattacccttgtaccatcaactacaccgtgttcaaagtcaggatgtacgtgggaggggtcgagcataggctggaggctgcctgcaactggacgcggggcgaacgttgcaatctggaagacagggacaggtccgactcagcccgttgctgctgtccaccacacagtggcaagtccttccgtgttccttcacgaccctgccagccttgtccaccggcctcatccacctccaccagaacattgtggacgtgcagtacttatacgggtggggtcaagcatcgcgtcctgggccatcaagtgggagtacgtcgttctcctattccttctgctcgcagacgcgcgcgtctgctcctgcttgtggatgatgttactcatatcccaagcggaggcggctttggagaacctgtagtgctcaatgcagcatctttggccgggacacacggtcttgtgtccctcctcgtgttcttctgctttgcgtggtacctgaagggtaggtgggtgcccggagcggtctacgccctctacgggatgtgcctctcctcctgctcctattggcgttgccccagcgggcatatgcgttggacacggaggtggccgcgtcgtgtggcggcgctgttcttgtcgggttgatggcgctgactctgtcaccatattacaagcgctatgtcagctgtgcttatggtggcttcagtactttctgaccagagcagaagcgcaactgcacgtgtgggttccccctctcgacgtccgaggggggcgcgacgccgtcatcttactcatgtgtgctgtacgcccggcttggtgtttgacatcaccaagctgctgctggccgtcctcggacccctctggattctccaagccagtttgcttaaagtgccctactttgtgcgcgttcaaggccttctccggatctgcgcgctagcgcggaagatggcggggggcattacgtgcaaatggtcatcatcaagttgggggcgctcactggcacttatgtgtataaccatctcactcctcttcgggactgggcgcacaacggcctgcgagatctggctgtggctgtagagccagcgtcttctcccgaatggagaccaacctcatcacgtggggggcagacaccgccgcatgcggcgacatcatcaacggcttgcccgtctccgcccgcaggggccgggagatactgctcggaccagccgacggaatggtctccaagggtggaggttgctggcacccatcacggcatacgcccagcagacaaggggcctcctagggtgtataatcaccagcctaaccggccgggacaaaaatcaggtggagggtgaggtccagattgtgtcaatgctgcccaaacctttctggcaacgtgcatcaatggagtatgctggaccgtctaccacggggccggaacgaggaccatcgcatcacccaagggtcctgttatccagatgtacaccaatgtagataaagatctcgtgggttgcccgctcctcaaggttcccgttctttggcaccctgcacctgcggctcctcggacctttatctggtcacgaggcacgccgatgtcattcccgtgcgccggcggggtgatagcaggggcagcctgctttgccccggcccatttcctacttgaaaggctcctcggggggtccgctgttgtgccccgcggggcacgccgtgggcattttcagggccgcggtgtgcacccgtggagtggctaaggcagtggactttatccctgtagagaacctgagacaaccatgaggtccccggtgttcacggacaactcctctccaccagcagtaccccagagcttccaggtggcccacctgcatgctcccacaggcagcggcaagagcaccaaggtcccagctgcatcgcagctcagggctataaggtgctagtgctcaacccctctgttgctgcaacactaggcttcggtgcttatatgtccaaggcccatgggatcgaccctaacatcaggaccggggtgagaacaattaccactggcagccccatacgtactccacctacggcaagttccttgccgacggcgggtgctcagggggtgcttatgacataataatctgtgacgagtgccactccacggatgccacgtccatcttaggcatcggcaccgtccttgccaagcagagaccgcaggggcgaggcttgttgtgctcgccaccgctacccctccgggctccatcactgtgccccatcctaacatcgaggaggttgctctgtccaccaccggagagatccccttttatggcaaggctatcccctcgaagtaatcaagggggggaggcatctcatcttctgtcattcaaagaagaagtgtgacgagctcgctgcaaagctggttgcattgggcgtcaatgccgtggcctattaccgcggtcttgacgtgttgtcatcccgaccagcggcgatgttgtcgtcgtggcaactgatgctctcatgaccggctataccggcgacttcgactcggtgatagactgcaacacgtgtgtcacccagacagtcgatttcagccttgaccccaccttcacattgagacaaccacgcttccccaggatgctgtctcccgtacacaacggcggggcaggactggcagggggaagccaggcacctacaggtttgtggcaccgggggagcgcccctctggcatgttcgactgtctgtcctctgtgagtgctatgacgcgggctgtgcttggtatgagctcacgcccgccgagaccacagttaggctacgagcgtacatgaacaccccggggcttcccgtgtgccaggaccaccttgaattttgggagggcgttttacgggccttacccatatagatgcccacttcctatcccagacaaagcagagtggggagaaccttccttacctggtagcgtaccaagccaccgtgtgcgctagggctcaagcccctcccccgtcgtggaccagatgtggaagtgtttagtccgcctcaagcccaccctccatgggccaacacccctgctatacagattgggcgctgttcagaatgaagtcaccctgacacacccaatcacaaaatacatcatgacatgtatgtcggcga

SEQ ID NO: 202 - DNA, 5221 bp, Hepatitis C virus
tcactcccctgtgaggaactactgtcttcacgcagaaagcgtctagccatggcgttagtatgagtgtcgtgcagcctccaggaccccccctcccgggagagccatagtggtctgcggaaccggtgagacaccggaattgccaggacgaccgggtcctttcttggataaacccgctcaatgcctggagatttgggcgtgcccccgcaagactgctagccgagtagtgttgggtcgcgaaaggccttgtggtactgctgatagggtgcttgcgagtgccccgggaggtctcgtagaccgtgcaccatgagcacgaatcctaaacctcaaagaaaaaccaaacgtaacaccaaccgtcgcccacaggacgtcaagttcccgggtggcggtcagatcgtggtggagtttacttgttgccgcgcaggggccctagattgggtgtgcgcgcgacgaggaagacttccgagcggtcgcaacctcgaggtagacgtcagcctatccccaaggcacgtcggcccgagggcagacctgggctcagcccgggtacccctggcccctctatggcaatgagggctgcgggtgggcgggatggctcctgtctccccgtggctctcggcctaactggggccccacagacccccggcgtaggtcgcgtaatttgggtaagtcatcgatacccttacatgcggcttcgccgacctcatggggtacataccgctcgtcggcgcccctcttgggggcgctgccagggccctggcgcatggcgtccgggttctggaagacggcgtgaacttgcaacagggaaccttcctggttgctctttctctatcttccttctggctttgctctcttgcctgactgtgcctgcttcagcctaccaagtgcgcaactccacggggctttatcatgtcaccaatgattgccctaactcgagattgtgtacgaggcggacgatgctatcctgcacactccggggtgtgtcccttgcgtccgcgagggtaacggctcgaggtgttgggtggcgataacccccacggtggccaccagggacggcaaactcccacagtgcagcttcgacgtcacatcgatctgctcgtcgggagcgctaccctttgttcggccctttacgtgggggacctgtgcgggtctgtctttcttgtcggccaactgttcaccttctctcccaggcgccactggacaaccaggactgcaattgttccatctatcccggccatataacgggtcaccgtatggcatgggacatgatgatgaactggtcccctacgacggcgctggtagtagctcagatgctccggatcccacaagccacctggacatgatcgctggtgctcactggggagtcctggcgggcatagcgtatttctccatggtggggaactgggcgaaggtcctggtagtgctgctgctatttgccggcgtcgacgcgggaacccacgtcaccgggggcatgccgcccgtaccacgtctagaattgctggtctcttcaacccaggcgcccagcaggacatccagctggttaacaccaacggcagttggcacatcaacagaacggccttgaactgtaacgatagccttccaccggctggatagcggggcttttctatcgctacaaattcaactcttcaggctgtcccgagaggttggccagctgccgaccccttaccgattttgcccagggctggggccctattagttacgccaacggaagcggccccgacaacgcccctactgctggcactatcccccaaagccttgcggcattgtgcccgcacagagcgtgtgtggcccggtgtattgcttcactcccagccccgtggtggtgggaacgaccgacaaggcgggcggcctacctacagatggggtgcaaacgatacggacgtcttcgtccttaacaacaccaggccaccactgggcaattggttcggttgcacctggatgaactcaactggatacaccaaagtgtgcggggcgcccccctgcgtcatggaggggtgggcaacaagaccttgcactgccccaccgattgtttccgcaagcatccggaagccacatactctcggtgcggctccggtccctggattacacccaggtgtctggtcgactatccgtatagctttggcattacccttgtaccatcaactacaccgtgttcaaagtcaggatgtacgtgggaggggtcgagcataggctggaggctgcctgcaactggacgcggggcgaacgttgcaatctggaagacagggacaggtccgactcagcccgttgctgctgtccaccacacagtggcaagtccttccgtgttccttcacgaccctgccagccttgtccaccggcctcatccacctccaccagaacattgtggacgtgcagtacttatacgggtggggtcaagcatcgcgtcctgggccatcaagtgggagtacgtcgttctcctattccttctgctcgcagacgcgcgcgtctgctcctgcttgtggatgatgttactcatatcccaagcggaggcggctttggagaacctgtagtgctcaatgcagcatctttggccgggacacacggtcttgtgtccctcctcgtgttcttctgctttgcgtggtacctgaagggtaggtgggtgcccggagcggtctacgccctctacgggatgtgcctctcctcctgctcctattggcgttgccccagcgggcatatgcgttggacacggaggtggccgcgtcgtgtggcggcgctgttcttgtcgggttgatggcgctgactctgtcaccatattacaagcgctatgtcagctgtgcttatggtggcttcagtactttctgaccagagcagaagcgcaactgcacgtgtgggttccccctctcgacgtccgaggggggcgcgacgccgtcatcttactcatgtgtgctgtacgcccggcttggtgtttgacatcaccaagctgctgctggccgtcctcggacccctctggattctccaagccagtttgcttaaagtgccctactttgtgcgcgttcaaggccttctccggatctgcgcgctagcgcggaagatggcggggggcattacgtgcaaatggtcatcatcaagttgggggcgctcactggcacttatgtgtataaccatctcactcctcttcgggactgggcgcacaacggcctgcgagatctggctgtggctgtagagccagcgtcttctcccgaatggagaccaacctcatcacgtggggggcagacaccgccgcatgcggcgacatcatcaacggcttgcccgtctccgcccgcaggggccgggagatactgctcggaccagccgacggaatggtctccaagggtggaggttgctggcacccatcacggcatacgcccagcagacaaggggcctcctagggtgtataatcaccagcctaaccggccgggacaaaaatcaggtggagggtgaggtccagattgtgtcaatgctgcccaaacctttctggcaacgtgcatcaatggagtatgctggaccgtctaccacggggccggaacgaggaccatcgcatcacccaagggtcctgttatccagatgtacaccaatgtagataaagatctcgtgggttgcccgctcctcaaggttcccgttctttggcaccctgcacctgcggctcctcggacctttatctggtcacgaggcacgccgatgtcattcccgtgcgccggcggggtgatagcaggggcagcctgctttgccccggcccatttcctacttgaaaggctcctcggggggtccgctgttgtgccccgcggggcacgccgtgggcattttcagggccgcggtgtgcacccgtggagtggctaaggcagtggactttatccctgtagagaacctgagacaaccatgaggtccccggtgttcacggacaactcctctccaccagcagtaccccagagcttccaggtggcccacctgcatgctcccacaggcagcggcaagagcaccaaggtcccagctgcatcgcagctcagggctataaggtgctagtgctcaacccctctgttgctgcaacactaggcttcggtgcttatatgtccaaggcccatgggatcgaccctaacatcaggaccggggtgagaacaattaccactggcagccccatacgtactccacctacggcaagttccttgccgacggcgggtgctcagggggtgcttatgacataataatctgtgacgagtgccactccacggatgccacgtccatcttaggcatcggcaccgtccttgccaagcagagaccgcaggggcgaggcttgttgtgctcgccaccgctacccctccgggctccatcactgtgccccatcctaacatcgaggaggttgctctgtccaccaccggagagatccccttttatggcaaggctatcccctcgaagtaatcaagggggggaggcatctcatcttctgtcattcaaagaagaagtgtgacgagctcgctgcaaagctggttgcattgggcgtcaatgccgtggcctattaccgcggtcttgacgtgttgtcatcccgaccagcggcgatgttgtcgtcgtggcaactgatgctctcatgaccggctataccggcgacttcgactcggtgatagactgcaacacgtgtgtcacccagacagtcgatttcagccttgaccccaccttcacattgagacaaccacgcttccccaggatgctgtctcccgtacacaacggcggggcaggactggcagggggaagccaggcacctacaggtttgtggcaccgggggagcgcccctctggcatgttcgactgtctgtcctctgtgagtgctatgacgcgggctgtgcttggtatgagctcacgcccgccgagaccacagttaggctacgagcgtacatgaacaccccggggcttcccgtgtgccaggaccaccttgaattttgggagggcgttttacgggccttacccatgtagatgcccacttcctatcccagacaaagcagagtggggagaaccttccttacctggtagcgtaccaagccaccgtgtgcgctagggctcaagcccctcccccgtcgtggaccagatgtggaagtgtttagtccgcctcaagcccaccctccatgggccaacacccctgctatacagattgggcgctgttcagaatgaagtcaccctgacacacccaatcacaaaatacatcatgacatgtatgtcggcga

SEQ ID NO: 203 - DNA, 5221 bp, Hepatitis C virus; identical to SEQ ID NO: 201

SEQ ID NO: 204 - DNA, 5221 bp, Hepatitis C virus; identical to SEQ ID NO: 201

SEQ ID NO: 205 - DNA, 5221 bp, Hepatitis C virus
tcactcccctgtgaggaactactgtcttcacgcagaaagcgtctagccatggcgttagtatgagtgtcgtgcagcctccaggaccccccctcccgggagagccatagtggtctgcggaaccggtgagacaccggaattgccaggacgaccgggtcctttcttggataaacccgctcaatgcctggagatttgggcgtgcccccgcaagactgctagccgagtagtgttgggtcgcgaaaggccttgtggtactgctgatagggtgcttgcgagtgccccgggaggtctcgtagaccgtgcaccatgagcacgaatcctaaacctcaaagaaaaaccaaacgtaacaccaaccgtcgcccacaggacgtcaagttcccgggtggcggtcagatcgtggtggagtttacttgttgccgcgcaggggccctagattgggtgtgcgcgcgacgaggaagacttccgagcggtcgcaacctcgaggtagacgtcagcctatccccaaggcacgtcggcccgagggcagacctgggctcagcccgggtacccctggcccctctatggcaatgagggctgcgggtgggcgggatggctcctgtctccccgtggctctcggcctaactggggccccacagacccccggcgtaggtcgcgtaatttgggtaagtcatcgatacccttacatgcggcttcgccgacctcatggggtacataccgctcgtcggcgcccctcttgggggcgctgccagggccctggcgcatggcgtccgggttctggaagacggcgtgaacttgcaacagggaaccttcctggttgctctttctctatcttccttctggctttgctctcttgcctgactgtgcctgcttcagcctaccaagtgcgcaactccacggggctttatcatgtcaccaatgattgccctaactcgagattgtgtacgaggcggacgatgctatcctgcacactccggggtgtgtcccttgcgtccgcgagggtaacggctcgaggtgttgggtggcgataacccccacggtggccaccagggacggcaaactcccacagtgcagcttcgacgtcacatcgatctgctcgtcgggagcgctaccctttgttcggccctttacgtgggggacctgtgcgggtctgtctttcttgtcggccaactgttcaccttctctcccaggcgccactggacaaccaggactgcaattgttccatctatcccggccatataacgggtcaccgtatggcatgggacatgatgatgaactggtcccctacgacggcgctggtagtagctcagatgctccggatcccacaagccacctggacatgatcgctggtgctcactggggagtcctggcgggcatagcgtatttctccatggtggggaactgggcgaaggtcctggtagtgctgctgctatttgccggcgtcgacgcgggaacccacgtcaccgggggcatgccgcccgtaccacgtctagaattgctggtctcttcaacccaggcgcccagcaggacatccagctggttaacaccaacggcagttggcacatcaacagaacggccttgaactgtaacgatagccttccaccggctggatagcggggcttttctatcgctacaaattcaactcttcaggctgtcccgagaggttggccagctgccgaccccttaccgattttgcccagggctggggccctattagttacgccaacggaagcggccccgacaacgcccctactgctggcactatcccccaaagccttgcggcattgtgcccgcacagagcgtgtgtggcccggtgtattgcttcactcccagccccgtggtggtgggaacgaccgacaaggcgggcggcctacctacagatggggtgcaaacgatacggacgtcttcgtccttaacaacaccaggccaccactgggcaattggttcggttgcacctggatgaactcaactggatacaccaaagtgtgcggggcgcccccctgcgtcatggaggggtgggcaacaagaccttgcactgccccaccgattgtttccgcaagcatccggaagccacatactctcggtgcggctccggtccctggattacacccaggtgtctggtcgactatccgtatagctttggcattacccttgtaccatcaactacaccgtgttcaaagtcaggatgtacgtgggaggggtcgagcataggctggaggctgcctgcaactggacgcggggcgaacgttgcaatctggaagacagggacaggtccgactcagcccgttgctgctgtccaccacacagtggcaagtccttccgtgttccttcacgaccctgccagccttgtccaccggcctcatccacctccaccagaacattgtggacgtgcagtacttatacgggtggggtcaagcatcgcgtcctgggccatcaagtgggagtacgtcgttctcctattccttctgctcgcagacgcgcgcgtctgctcctgcttgtggatgatgttactcatatcccaagcggaggcggctttggagaacctgtagtgctcaatgcagcatctttggccgggacacacggtcttgtgtccctcctcgtgttcttctgctttgcgtggtacctgaagggtaggtgggtgcccggagcggtctacgccctctacgggatgtgcctctcctcctgctcctattggcgttgccccagcgggcatatgcgttggacacggaggtggccgcgtcgtgtggcggcgctgttcttgtcgggttgatggcgctgactctgtcaccatattacaagcgctatgtcagctgtgcttatggtggcttcagtactttctgaccagagcagaagcgcaactgcacgtgtgggttccccctctcgacgtccgaggggggcgcgacgccgtcatcttactcatgtgtgctgtacgcccggcttggtgtttgacatcaccaagctgctcctggccgtcctcggacccctctggattctccaagccagtttgcttaaagtgccctactttgtgcgcgttcaaggccttctccggatctgcgcgctagcgcggaagatggcggggggcattacgtgcaaatggtcatcatcaagttgggggcgctcactggcacttatgtgtataaccatctcactcctcttcgggactgggcgcacaacggcctgcgagatctggctgtggctgtagagccagcgtcttctcccgaatggagaccaacctcatcacgtggggggcagacaccgccgcatgcggcgacatcatcaacggcttgcccgtctccgcccgcaggggccgggagatactgctcggaccagccgacggaatggtctccaagggtggaggttgctggcacccatcacggcatacgcccagcagacaaggggcctcctagggtgtataatcaccagcctaaccggccgggacaaaaatcaggtggagggtgaggtccagattgtgtcaatgctgcccaaacctttctggcaacgtgcatcaatggagtatgctggaccgtctaccacggggccggaacgaggaccatcgcatcacccaagggtcctgttatccagatgtacaccaatgtagataaagatctcgtgggttgcccgctcctcaaggttcccgttctttggcaccctgcacctgcggctcctcggacctttatctggtcacgaggcacgccgatgtcattcccgtgcgccggcggggtgatagcaggggcagcctgctttgccccggcccatttcctacttgaaaggctcctcggggggtccgctgttgtgccccgcggggcacgccgtgggcattttcagggccgcggtgtgcacccgtggagtggctaaggcagtggactttatccctgtagagaacctgagacaaccatgaggtccccggtgttcacggacaactcctctccaccagcagtaccccagagcttccaggtggcccacctgcatgctcccacaggcagcggcaagagcaccaaggtcccagctgcatcgcagctcagggctataaggtgctagtgctcaacccctctgttgctgcaacactaggcttcggtgcttatatgtccaaggcccatgggatcgaccctaacatcaggaccggggtgagaacaattaccactggcagccccatacgtactccacctacggcaagttccttgccgacggcgggtgctcagggggtgcttatgacataataatctgtgacgagtgccactccacggatgccacgtccatcttaggcatcggcaccgtccttgccaagcagagaccgcaggggcgaggcttgttgtgctcgccaccgctacccctccgggctccatcactgtgccccatcctaacatcgaggaggttgctctgtccaccaccggagagatccccttttatggcaaggctatcccctcgaagtaatcaagggggggaggcatctcatcttctgtcattcaaagaagaagtgtgacgagctcgctgcaaagctggttgcattgggcgtcaatgccgtggcctattaccgcggtcttgacgtgttgtcatcccgaccagcggcgatgttgtcgtcgtggcaactgatgctctcatgaccggctataccggcgacttcgactcggtgatagactgcaacacgtgtgtcacccagacagtcgatttcagccttgaccccaccttcacattgagacaaccacgcttccccaggatgctgtctcccgtacacaacggcggggcaggactggcagggggaagccaggcacctacaggtttgtggcaccgggggagcgcccctctggcatgttcgactgtctgtcctctgtgagtgctatgacgcgggctgtgcttggtatgagctcacgcccgccgagaccacagttaggctacgagcgtacatgaacaccccggggcttcccgtgtgccaggaccaccttgaattttgggagggcgttttacgggccttacccatatagatgcccacttcctatcccagacaaagcagagtggggagaaccttccttacctggtagcgtaccaagccaccgtgtgcgctagggctcaagcccctcccccgtcgtggaccagatgtggaagtgtttagtccgcctcaagcccaccctccatgggccaacacccctgctatacagattgggcgctgttcagaatgaagtcaccctgacacacccaatcacaaaatacatcatgacatgtatgtcggcga

SEQ ID NO: 206 - DNA, 5221 bp, Hepatitis C virus; identical to SEQ ID NO: 201

SEQ ID NO: 207 - DNA, 5221 bp, Hepatitis C virus; identical to SEQ ID NO: 201

SEQ ID NO: 208 - DNA, 4869 bp, Hepatitis C virus
tcgcccacaggacgtcaagttcccgggtggcggtcagatcgttggtggagtttacttgttgccgcgcaggggccctagattgggtgtgcgcgcgacgaggaagacttccgagcggtcgcaacctcgagtagacgtcagcctatccccaaggcacgtcggcccgagggcaggacctgggctcagcccgggtacccctggcccctctatggcaatgagggctgcgggtgggcgggatggctcctgtctccccgtggtctcggcctaactggggccccacagacccccggcgtaggtcgcgtaatttgggtaaggtcatcgatacccttacatgcggcttcgccgacctcatggggtacataccgctcgtcggcgcccctcttgggggcgctgccaggccctggcgcatggcgtccgggttctggaagacggcgtgaactatgcaacagggaaccttcctggttgctctttctctatcttccttctggctttgctctcttgcctgactgtgcctgcttcagcctacaagtgcgcaactccacggggctttatcatgtcaccaatgattgccctaactcgagtattgtgtacgaggcggacgatgctatcctgcacactccggggtgtgtcccttgcgtccgcgagggtaacggctcgaggtgttggtggcgataacccccacggtggccaccagggacggcaaactccccacagtgcagcttcgacgtcacatcgatctgctcgtcgggagcgctaccctttgttcggccctttacgtgggggacctgtgcggtctgtctttcttgtcggccaactgttcaccttctctcccaggcgccactggacaacgcaggactgcaattgttccatctatcccggccatataacgggtcaccgtatggcatgggacatgatgatgaactggtcccctacgcggcgctggtagtagctcagatgctccggatcccacaagccatcctggacatgatcgctggtgctcactggggagtcctggcgggcatagcgtatttctccatggtggggaactgggcgaaggtcctgtagtgctgctgctatttgccggcgtcgacgcgggaacccacgtcaccgggggcattgccgcccgtaccacgtctagaattgctggtctcttcaacccaggcgcccagcaggacatccagctggttaacaccaacggcagtggcacatcaacagaacggccttgaactgtaacgatagccttcacaccggctggatagcggggcttttctatcgctacaaattcaactcttcaggctgtcccgagaggttggccagctgccgacccctaccgattttgcccagggctggggccctattagttacgccaacggaagcggccccgaccaacgcccctactgctggcactatcccccaaagccttgcggcattgtgcccgcacagagcgtgtgtggcccggtgtattgcttcctcccagccccgtggtggtgggaacgaccgacaaggcgggcgcgcctacctacagatggggtgcaaacgatacggacgtcttcgtccttaacaacaccaggccaccactgggcaattggtttggttgacctggatgaactcaactggatacaccaaagtgtgcggggcgcccccctgcgtcatcggaggggtgggcaacaagaccttgcactgccccaccgattgtttccgcaagcatccggaagccacatactctcggtgcggctccgtccctggattacacccaggtgtctggtcgactatccgtataggctttggcattacccttgtaccatcaactacaccgtgttcaaagtcaggatgtacgtgggaggggtcgagcataggctggaggcgcctgcaactggacgcggggcgaacgttgcaatctggaagacagggacaggtccgagctcagcccgttgctgctgtccaccacacagtggcaagtccttccgtgttccttcacgaccctgccagccttgtccaccggcctctccacctccaccagaacattgtggacgtgcagtacttatacggggtggggtcaagcatcgcgtcctgggccatcaagtgggagtacgtcgttctcctattccttctgctcgcagacgcgcgcgtctgtcctgcttgtggatgatgttactcatatcccaagcggaggcggctttggagaacctcgtagtgctcaatgcagcatctttggccgggacacacggtcttgtgtccctcctcgtgttcttctgctttgcgtggtacctgaaggtaggtgggtgcccggagcggtctacgccctctacgggatgtggcctctcctcctgctcctattggcgttgccccagcgggcatatgcgttggacacggaggtggccgcgtcgtgtggcggcgctgtcttgtcgggttgatggcgctgactctgtcaccatattacaagcgctatgtcagctggtgcttatggtggcttcagtactttctgaccagagcagaagcgcaactgcacgtgtgggttccccctctcgacgtccgagggggggcgacgccgtcatcttactcatgtgtgctgtacgcccggctttggtgtttgacatcaccaagctgctgctggccgtcctcggacccctctggattctccaagccagtttgcttaaagtgccctacttgtgcgcgttcaaggccttctccggatctgcgcgctagcgcggaagatggcggggggtcattacgtgcaaatggtcatcatcaagttgggggcgctcactggcacttatgtgtataaccatctcactcctcttcgggactggcgcacaacggcctgcgagatctggctgtggctgtagagccagtcgtcttctcccgaatggagaccaacctcatcacgtggggggcagacaccgccgcatgcggcgacatcatcaacggcttgcccgttccgcccgcaggggccgggagatactgctcggaccagccgacggaatggtctccaaggggtggaggttgctggcacccatcacggcatacgcccagcagacaaggggcctcctagggtgtataatcaccagcctaaccggcgggacaaaaatcaggtggagggtgaggtccagattgtgtcaactgctgcccaaacctttctggcaacgtgcatcaatggagtatgctggaccgtctaccacggggccggaacgaggaccatcgcatccccaagggtcctgttatccagatgtacaccaatgtagataaagatctcgtgggttggcccgctcctcaaggttcccgttctttggcaccctgcacctgcggctcctcggacctttatctggtcacgaggcacgccgatgtcttcccgtgcgccggcggggtgatagcaggggcagcctgctttcgccccggcccatttcctacttgaaaggctcctcggggggtccgctgttgtgccccgcggggcacgccgtgggcattttcagggcgcggtgtgcacccgtggagtggctaaggcagtggactttatccctgtagagaacctagagacaaccatgaggtccccggtgttcacggacaactcctctccaccagcagtaccccagagcttccaggtggcccacctgcatctcccacaggcagcggcaagagcaccaaggtcccagctgcatacgcagctcagggctataaggtgctagtgctcaacccctctgttgctgcaacactaggcttcggtgcttatatgtccaaggcccagggatcgaccctaacatcaggaccggggtgagaacaattaccactggcagccccatcacgtactccacctacggcaagttccttgccgacggcgggtgctcagggggtgcttatgacataataatctgtgacgagtgccacccacggatgccacgtccatcttaggcatcggcaccgtccttgaccaagcagagaccgcaggggcgaggcttgttgtgctcgccaccgctacccctccgggctccatcactgtgccccatcctaacatgaggaggttgctctgtccaccaccggagagatccccttttatggcaaggctatccccctcgaagtaatcaagggggggaggcatctcatcttctgtcattcaaagaagaagtgtgacgagctcgctgcaaagctggttgcatgggcgtcaatgccgtggcctattaccgcggtcttgacgtgtctgtcatcccgaccagcggcgatgttgtcgtcgtggcaactgatgctctcatgaccggctataccggcgacttcgactcggtgatgactgcaacacgtgtgtcacccagacagtcgatttcagccttgaccccaccttcaccattgagacaaccacgcttccccaggatgctgtctcccgtacacaacggcggggcaggactggcagggggaagccaggcacctacggtttgtggcaccgggggagcgcccctctggcatgttcgactcgtctgtcctctgtgagtgctatgacgcgggctgtgcttggtatgagctcacgcccgccgagaccacagttaggctacgagcgtaatgaacaccccggggcttcccgtgtgccaggaccaccttgaattttgggagggcgtctttacgggccttacccatatagatgcccacttcctatcccagacaaagcagagtggggagaaccttccttacctggtagcgtacaagccaccgtgtgcgctagggctcaagcccctcccccgtcgtgggaccagatgtggaagtgtttagtccgcctcaagcccaccctccatgggccaacacccctgctatacagattgggcgctgttcaaatgaagtcaccctgacacacccaatcacaaaatacatcatgacatgtatgtcggctga

SEQ ID NO: 209 - DNA, 4869 bp, Hepatitis C virus
tcgcccacaggacgtcaagttcccgggtggcggtcagatcgttggtggagtttacttgttgccgcgcaggggccctagattgggtgtgcgcgcgacgaggaagacttccgagcggtcgcaacctcgagcagacgtcagcctatccccaaggcacgtcggcccgagggcaggacctgggctcagcccgggtacccctggcccctctatggcaatgagggctgtgggtgggcgggatggctcctgtctccccgtggtctcggcctagctggggcccctcagacccccggcgtaggtcgcgtaatttgggtaaagtcatcgatacccttacatgcggcttcgccgacctcatggggtacataccgctcgtcggcgctcctcttgggggcgctgccaggccctggcgcatggcgtccgggttctggaagacggcgtgaactatgcaacagggaaccttcctggttgctctttctctatcttcctcctggctttgctctcttgcctgactgtgcctgcttcagcctacaagtgcgcaactccacggggctttatcatgtcaccaatgattgccctaactcgagtattgtgtacgaggcggccgatgctatcctgcacactccggggtgtgtcccttgcgtctacgagggtaacgcctcgaggtgttggtggcgataacccccacggtggccaccagggatggcaaactccccacagtccagcttcgacgtcacatcgatctgcttgtcgggagcgctaccctttgttcggccctttacgtgggggacctgtgcggtctgtctttcttgtcggccaactattcaccttctctcccaggctccactggacaacgcaggactgcaattgttccatctaccccggccatataacgggtcaccgtatggcatgggacatgatgatgaactggtcccctacgcggcgctggtagtagctcagatgctccggatcccgcaagccatcttggacatgatcgctggtgctcactggggagtcctagcgggcatagcgtatttctccatggtggggaactgggcgaaggtcctgtagtgctgctgctatttgccggcgtcgacgcggaaacccacgtcaccgggggagctgccggccgtaccatggctggatttactggtctctttacacaaggcgccaagcagagcatccagttggttaacaccaacggcagtggcacatcaacagaacggctttgaactgcaacgatagccttcagaccggctggatagcggggcttctctatcacaacaaattcaactcttcaggctgtcccgagaggttggccagctgccgacccctaccgattttgcccagggctggggccctatcagttacgccaacggaagcgggcccgaccaacgcccctactgctggcactaccccccaaagccttgcggcattgtgcccgcacagagcgtatgtggcccggtatattgtttcctcctagccccgtggtggtgggaacgaccgacaggtcgggcgcgcctacctacggatggggtgcaaacgatacggacgtcttcgtccttaacaacaccaggccaccactgggcaattggttcggttgacctggatgaactcaactggatacaccaaagtgtgcggggcgcccccctgtgtcatcagaggggtgggcaataacaccttgcactgccccaccgattgtttccgcaagcatccggaaaccacatactctcggtgcggctccgtccctggattacacccaggtgcctggtcaactacccgtataggctttggcattacccttgtaccatcaactacaccgtgttcaaggtcaggatgtacgtgggaggggtcgagcataggctagaggcgcctgcaactggacgcggggcgaacgttgcagtctggaagacagggacaggtccgagctcagcccgttgctgctgtccaccacacagtggcaggtccttccctgttccttcacgaccctgccagccttgtccaccggcctctccacctccaccagaacattgtggacgtgcagtacttatacggggtggggtcaagtatcgcgtcctgggccatcaagtgggagtacgtcgttctcctattccttctgcttgcagacgcgcgcgtctgtcctgcttgtggatgatgttactcatatcccaagcggaggcggccttggagaacctcgtagtgctcaatgcagcatctttggccgggacgcatggtcttgtgtccttcctcgtgttcttctgctttgcgtggtacctgaaggtaggtgggtgcccggagcgacctacgccctctacgggatgtggcctctcctcctgctcctgttggcgttgccccagcgggcatacgcgttggacacggaggtggccgcgtcgtgtggcggcgctgtcttgtcgggttgatggcgctgactctgtcaccacattacaagcgatatgtcagctggtgcttgtggtggcttcagtactttctgaccagagcagaagcgcaactgcacgtgtgggttccccccctcgacgtccgagggggggcgacgccgtcatcttactcatgtgtgctgtacgcccgactttggtgtttgacatcaccaagctgctgctggccgtcttcgggcccctttggattctccaagccagtttgcttaaagtaccctacttgtgcgcgttcaaggccttctccggatctgcgcgctagcgcggaagatggcggggggtcattacgtgcaaatggtcatcatcaaactaggggcgctcactggcacctatgtttataaccacctcactcctcttcgggactggcgcacaacggcctgcgagatctggctgtggctgtagagccagtcgtcttctcccgaatggagaccaacctcatcacgtggggggcagacaccgccgcgtgcggtgacatcatcaacggcttgcccgttccgcccgtaggggccgggagatactgctcggaccagccgacggaatggtctccaaggggtggaggttgctggcacccatcacggcatacgcccagcagacaaggggcctcctagggtgtataatcaccagcctaaccggcgggacaaaaaccaggtggagggtgaggtccagattgtgtcaactgctgcccaaactttcctggcaacgtgcatcaacggagtatgctggaccgtctaccacggggccgggacgaggaccatcgcatccccaagggtcctgtcatccagatgtacaccaatgtagacaaagatcttgtgggctggcccgctccccaaggctcccgttcattgacaccctgcacctgcggctcctcggacctttatctggtcacgaggcacgccgatgtcttcccgtgcgccggcggggtgatagcaggggcagcctgctttcgccccggcctatttcctacttgaaaggctcctcggggggtccgctgttgtgccccgcggggcatgctgtgggcatattcagggcgcagtgtgcacccgtggagtggctaaggcggtggactttatccctgtagagaacctagagacaaccatgaggtccccggtgttcacggacaactcctctccaccggcagtaccccagagcttccaggtggcccacctgcatctcccacaggcagcggcaagagcaccaaggtcccggctgcatacgcagctcagggctataaggtgctagtgctcaacccctctgttgctgcaacactgggcttcggtgtttatatgtccaaggcccagggatcgatcctaacatcaggaccggggtgagaacaattaccactggcagccccatcacgtactccacctacggcaagttccttgccgacggcgggtgctcagggggtgcttatgacataataatctgtgacgagtgccacccacggatgccacatctatcttaggcatcggcaccgtccttgaccaagcagagaccgcgggggcgaggcttgttgtgctcgccaccgctacccctccgggctccgtcaccgtgccccatcctaacatgaggaggttgctctgtccaccaccggagagatccctttttatggcaaggctatccccctcgaagtaatcaagggggggaggcatctcatcttctgtcattcaaagaagaagtgtgacgagctcgccgcaaagctggttgcatgggcgtcaatgccgtggcctattaccgcggccttgacgtgtctgtcatcccgaccagcggcgatgttgtcgtcgtggcaactgatgctctcatgaccggctataccggcgacttcgactcggtgatgactgcaatacgtgtgtcacccagacagttgatttcagccttgaccccaccttcaccattgagacaaccacgcttccccaggatgctgtctcccgtacacaacgtcggggcaggactggcagggggaagccaggcacctacgatttgtggcaccgggggagcgcccctccggcatgttcgactcgtctgtcctctgtgagtgctatgacgcgggctgtgcttggtatgagctcacgcccgccgagactacagttaggctacgagcgtaatgaacaccccggggcttcccgtgtgccaggaccaccttgaattttgggagggcgtctttacgggccttactcatatagatgcccacttcctatcccagacaaagcagagtggggagaaccttccttacctggtagcgtacaagccaccgtgtgcgctagggctcaagcccctcccccatcgtgggaccagatgtggaagtgcttggtccgcctcaagcccaccctccatgggccaacacccctgctatacagattgggcgctgttcaaatgaagtcaccctgacacacccaatcacaaaatacatcatgacatgtatgtcggctga

SEQ ID NO: 210 - DNA, 4869 bp, Hepatitis C virus
tcgcccacaggacgtcaagttcccgggtggcggtcagatcgttggtggagtttacttgttgccgcgcaggggccctagattgggtgtgcgcgcgacgaggaagacttccgagcggtcgcaacctcgagcagacgtcagcctatccccaaggcacgtcggcccgagggtaggacctgggctcagcccgggtacccctggcccctctatggcaatgagggctgtgggtgggcgggatggctcctgtctccccgtggtctcggcctagctggggcccctcagacccccggcgtaggtcgcgtaatttgggtaaagtcatcgatacccttacatgcggcttcgccgacctcatggggtacataccgctcgtcggcgcccctcttgggggcgctgccaggccctggcgcatggcgtccgggttctggaagacggcgtgaactatgcaacagggaaccttcctggttgctctttctctatcttcctcctggctttgctctcttgcctgactgtgcctgcttcagcctacaagtgcgcaactccacggggctttatcatgtcaccaatgattgccctaactcgagtattgtgtacgaggcggccgatgctatcctgcacactccggggtgtgtcccttgcgtctacgagggtaacgcctcgaggtgttggtggcgataacccccacggtggccaccagggacggcaaactccccacagtgcagcttcgacgtcacatcgatctgcttgtcgggagcgctaccctttgttcggccctttacgtgggggacctgtgcggtctgtctttcttgtcggccaactgttcaccttctctcccaggctccactggacaacgcaggactgtaattgttccatctaccccggccatataacgggtcaccgtatggcatgggacatgatgatgaactggtcccctacgcggcgctggtagtagctcagatgctccggatcccgcaagccatcttggacatgatcgctggtgctcactggggagtcctagcgggcatagcgtatttctccatggtggggaactgggcgaaggtcctgtagtgctgctgctatttgccggcgtcgacgcggggacccacgtcaccgggggagctgccggccgtaccacggctggatttgctggtctctttacacgaggcgcccagcagagcatccagttggttaacaccaacggcagtggcacatcaacagaacggctttgaactgcaacgatagccttcagaccggctggatagcggggcttctctatcacaacaaattcaactcttcaggctgtcccgagaggttggccagctgccgacccctaccgattttgcccagggctggggccctatcagttacgccaacggaagcggccccgaccaacgcccctactgctggcactaccccccaaagccttgcggcattgtgcccgcacagagcgtatgtggcccggtatattgtttccccctagccccgtggtggtgggaacgaccgacaggtcgggcgcgcctacctacggatggggtgcaaacgatacggacgtcttcgtcctcaacaacaccaggccaccactgggcaattggttcggttgacctggatgaactcaactggatataccaaagtgtgcggggcgcccccctgtttcatcagaggggtgggcaacaacaccttgcactgccccaccgattgcttccgcaagcatccggaagccacatactctcggtgcggctccgtccctggattacacccaggtgcctggtcaactacccgtataggctttggcattacccttgtaccatcaactacaccgtgttcaaggtcaggatgtacgtgggaggggttgagcataggctagaggcgcctgcaactggacgcggggcgaacgttgcagtctggaagacagggacaggtccgagctcagcccgttgctgctgtccaccacacagtggcaggtccttccctgttccttcacgaccctgccagccttgtccactggcctctccacctccaccagaacattgtggacgtgcagtacttatacggggtggggtcaagtatcgcgtcctgggccatcaagtgggagtacgtcgttctcctattccttctgcttgcagacgcgcgcgtctgtcctgcttgtggatgatgttgctcatatcccaagcggaggcggccttggagaacctcgtagtgctcaatgcagcatctttggccgggacgcatgggtttgtgtccttcctcgtgttcttctgctttgcgtggtacctgaaggtaggtgggtgcccggagcagcctacgccctctacgggatgtggcctctcctcctgctcctgttggcgttgccccagcgggcatacgcgttggacacggaggtggccgcgtcgtgtggcggcgctgtcttgtcgggttgatggcgctgactctgtcaccacattacaagcgatatgtcagctggtgcttgtggtggcttcagtactttctgaccagagcagaagcgcaactgcacgtgtgggttccccccctcgacgtccgagggggggcgacgccgtcatcttactcatgtgtgctgtacgcccgactttggtgtttgacatcaccaagctgctgctggccgtcttcgggcccctttggattctccaagccagtttgctcaaagtaccctacttgtgcgcgttcaaggccttctccggatctgcgcgctagcgcggaagatggcggggggtcattacgtgcaaatggtcatcatcaagctaggggcgctcactggcacctatgtttataaccacctcactcctcttcgggactggcgcacaacggcctgcgagatctggctgtggctgtagagccagtcgtcttctcccgaatggagaccaacctcatcacgtggggggcagacaccgccgcgtgcggtgacatcatcaacggcttgcccgttccgcccgtaggggccgggagatactgctcggaccagccgacggaatggtctccaaggggtggaggttgctggcacccatcacggcatatgcccagcagacgaggggcctcctagggtgtataatcaccagcctaaccggcgggacaaaaaccaggtggagggtgaggtccagattgtgtcaactgctgcccaaactttcctggcaacgtgcatcaatggagtatgctggaccgtctaccacggggccgggacgaggaccatcgcatccccaagggtcctgtcatccagatgtacaccaatgtagacaaagatcttgtgggctggcccgctccccaaggttcccgttcattgacaccctgcacctgcggctcctcggacctttatctggtcacgaggcacgccgatgtcttcccgtgcgccggcggggtgatagcaggggcagcctgctttcgccccggcccatttcctacttgaaaggctcctcggggggtccgctgttgtgccccgcggggcatgctgtgggcatattcagggcgcagtgtgcacccgtggagtggctaaggcggtggactttatccctgtagagaacctagagacaaccatgaggtccccggtgttcacggacaactcctctccaccggcagtaccccagagcttccaggtggcccacctgcatctcccacaggcagcggcaagagcaccaaggtcccggctgcatacgcagctcagggctataaggtgctagtgctcaacccctctgttgctgcaacactaggcttcggtgtttatatgtccaaggcccagggatcgatcctaacatcaggaccggggtgagaacaattaccactggcagccccatcacgtactccacctacggcaagttccttgccgacggcgggtgctcagggggtgcttatgacataataatctgtgacgagtgccacccacggatgccacatctatcttaggcatcggcaccgtccttgaccaagcagagaccgcgggggcgaggcttgttgtgctcgccaccgctacccctccgggctccgtcaccgtgccccatcctaacatgaggaggttgctctgtccaccaccggagagatccctttttatggcaaggctatccccctcgaagtaatcaagggggggaggcatctcatcttctgtcattcaaagaagaagtgtgacgagctcgccgcaaagctggttgcatgggcgtcaatgccgtggcctattaccgcggccttgacgtgtctgtcatcccgaccagcggcgatgttgtcgtcgtggcaactgatgctctcatgaccggctataccggcgacttcgactcggtgatgactgcaacacgtgtgtcatccagacagttgatttcagccttgaccccaccttcaccattgagacaaccacgcttccccaggatgctgtctcccgtacacaacgtcggggcaggactggcagagggaagccaggcacctacgatttgtggcaccgggggagcgcccctccggcatgttcgactcgtctgtcctctgtgagtgctatgacgcgggctgtgcttggtatgagctcacgcccgccgagactacagttaggctacgagcgtaatgaacaccccgggacttcccgtgtgccaggaccaccttgaattttgggagggcgtctttacgggccttactcatatagatgcccacttcctatcccagacaaagcagagcggggagaaccctccttacctggtagcgtacaagccaccgtgtgcgctagggctcaagcccctcccccatcgtgggaccagatgtggaagtgcttggtccgcctcaagcccaccctccatggaccaacacccctgctatacagattgggcgctgttcaaatgagatcaccctgacacacccaatcacaaaatacatcatgacatgtatgtcggctga

SEQ ID NO: 211 - DNA, 4869 bp, Hepatitis C virus; identical to SEQ ID NO: 194

SEQ ID NO: 212 - DNA, 4869 bp, Hepatitis C virus
tcgcccacaggacgtcaagttcccgggtggcggtcagatcgttggtggagttcacttgttgccgcgcaggggccctagattgggtgtgcgcgcgacgaggaagacttccgagcggtcgcaacctcgagtagacgtcagcctattcccaaggcacgtcggcccgagggcaggacctgggctcagcccgggtacccctggcccctctatggcaatgagggctgcgggtgggcgggatggctcctgtctccccgtggtctcggcctaactggggccccacagacccccggcgtaggtcgcgtaatttgggtaaggtcatcgatacccttacatgcggcttcgccgacctcatggggtacataccgctcgtcggcgcccctcttgggggcgctgccaggccctggcgcatggcgtccgggttctggaagacggcgtgaactatgcaacagggaaccttcctggttgctctttctctatcttccttctggctttgctctcttgcctgactgtgcctgcttcagcctacaagtgcgcaactccacggggctttatcatgtcaccaatgattgccctaactcgagtattgtgtacgaggcggacgatgctatcctgcacactccggggtgtgtcccttgcgtccgcgagggtaacggctcgaggtgttggtggcgataacccccacggtggccaccagggacggcaaactccccacagtgcagcttcgacgtcacatcgatctgctcgtcgggagcgctaccctttgttcggccctttacgtgggggacctgtgcggtctgtctttcttgtcggccaactgttcaccttctctcccaggcgccactggacaacgcaggactgcaattgttccatctatcccggccatataacgggtcaccgtatggcatgggacatgatgatgaactggtcccctacgcggcgctggtagtagctcagatgctccggatcccacaagccatcctggacatgatcgctggtgctcactggggagtcctggcgggcatagcgtatttctccatggtggggaactgggcgaaggtcctgtagtgctgctgctatttgccggcgtcgacgcgggaacccacgtcaccgggggcattgccgcccgtaccacgtctagaattgctggtctcttcaacccaggcgcccagcaggacatccagctggttaacaccaacggcagtggcacatcaacagaacggccttgaactgtaacgatagccttcacaccggctggatagcggggcttttctatcgctacaaattcaactcttcaggctgtcccgagaggttggccagctgccgacccctaccgattttgcccagggctggggccctattagttacgccaacggaagcggccccgaccaacgcccctactgctggcactatcccccaaagccttgcggcattgtgcccgcacagagcgtgtgtggcccggtgtattgcttcctcccagccccgtggtggtgggaacgaccgacaaggcgggcgcgcctacctacagatggggtgcaaacgatacggacgtcttcgtccttaacaacaccaggccaccactgggcaattggttcggttgacctggatgaactcaactggatacaccaaagtgtgcggggcgcccccctgcgtcatcggaggggtgggcaacaagaccttgcactgccccaccgattgtttccgcaagcatccggaagccacatactctcggtgcggctccgtccctggattacacccaggtgtctggtcgactatccgtataggctttggcattacccttgtaccatcaactacaccgtgttcaaagtcaggatgtacgtgggaggggtcgagcataggctggaggcgcctgcaactggacgcggggcgaacgttgcaatctggaagacagggacaggtccgagctcagcccgttgctgctgtccaccacacagtggcaagtccttccgtgttccttcacgaccctgccagccttgtccaccggcctctccacctccaccagaacattgtggacgtgcagtacttatacggggtggggtcaagcatcgcgtcctgggccatcaagtgggagtacgtcgttctcctattccttctgctcgcagacgcgcgcgtctgtcctgcttgtggatgatgttactcatatcccaagcggaggcggctttggagaacctcgtagtgctcaatgcagcatctttggccgggacacacggtcttgtgtccctcctcgtgttcttctgctttgcgtggtacctgaaggtaggtgggtgcccggagcggtctacgccctctacgggatgtggcctctcctcctgctcctattggcgttgccccagcgggcatatgcgttggacacggaggtggccgcgtcgtgtggcggcgctgtcttgtcgggttgatggcgctgactctgtcaccatattacaagcgctatgtcagctggtgcttatggtggcttcagtactttctgaccagagcagaagcgcaactgcacgtgtgggttccccctctcgacgtccgagggggggcgacgccgtcatcttactcatgtgtgctgtacgcccggctttggtgtttgacatcaccaagctgctgctggtcgtcctcggacccctctggattctccaagccagtttgcttaaagtgccctacttgtgcgcgttcaaggccttctccggatctgcgcgctagcgcggaagatggcggggggtcattacgtgcaaatggtcatcatcaagttgggggcgctcactggcacttatgtgtataaccatctcactcctcttcgggactggcgcacaacggcctgcgagatctggctgtggctgtagagccagtcgtcttctcccgaatggagaccaacctcatcacgtggggggcagacaccgccgcatgcggcgacatcatcaacggcttgcccgttccgcccgcaggggccgggagatactgctcggaccagccgacggaatggtctccaaggggtggaggttgctggcacccatcacggcatacgcccagcagacaaggggcctcctagggtgtataatcaccagcctaaccggcgggacaaaaatcaggtggagggtgaggtccagattgtgtcaactgctgcccaaacctttctggcaacgtgcatcaatggagtatgctggaccgtctaccacggggccggaacgaggaccatcgcatccccaagggtcctgttatccagatgtacaccaatgtagataaagatctcgtgggttggcccgctcctcaaggttcccgttctttggcaccctgcacctgcggctcctcggacctttatctggtcacgaggcacgccgatgtcttcccgtgcgccggcggggtgatagcaggggcagcctgctttcgccccggcccatttcctacttgaaaggctcctcggggggtccgctgttgtgccccgcggggcacgccgtgggcattttcagggcgcggtgtgcacccgtggagtggctaaggcagtggactttatccctgtagagaacctagagacaaccatgaggtccccggtgttcacggacaactcctctccaccagcagtaccccagagcttccaggtggcccacctgcatctcccacaggcagcggcaagagcaccaaggtcccagctgcatacgcagctcagggctataaggtgctagtgctcaacccctctgttgctgcaacactaggcttcggtgcttatatgtccaaggcccagggatcgaccctaacatcaggaccggggtgagaacaattaccactggcagccccatcacgtactccacctacggcaagttccttgccgacggcgggtgctcagggggtgcttatgacataataatctgtgacgagtgccacccacggatgccacgtccatcttaggcatcggcaccgtccttgaccaagcagagaccgcaggggcgaggcttgttgtgctcgccaccgctacccctccgggctccatcactgtgccccatcctaacatgaggaggttgctctgtccaccaccggagagatccccttttatggcaaggctatccccctcgaagtaatcaagggggggaggcatctcatcttctgccattcaaagaagaagtgtgacgagctcgctgcaaagctggttgcatgggcgtcaatgccgtggcctattaccgcggtcttgacgtgtctgtcatcccgaccagcggcgatgttgtcgtcgtggcaactgatgctctcatgaccggctataccggcgacttcgactcggtgatgactgcaacacgtgtgtcacccagacagtcgatttcagccttgaccccaccttcaccattgagacaaccacgcttccccaggatgctgtctcccgtacacaacggcggggcaggactggcagggggaagccaggcacctacggtttgtggcaccgggggagcgcccctctggcatgttcgactcgtctgtcctctgtgagtgctatgacgcgggctgtgcttggtatgagctcacgcccgccgagaccacagttaggctacgagcgtaatgaacaccccggggcttcccgtgtgccaggaccaccttgaattttgggagggcgtctttacgggccttacccatatagatgcccacttcctatcccagacaaagcagagtggggagaaccttccttacctggtagcgtacaagccaccgtgtgcgctagggctcaagcccctcccccgtcgtgggaccagatgtggaagtgtttagtccgcctcaagcccaccctccatgggccaacacccctgctatacagattgggcgctgttcaaatgaagtcaccctgacacacccaatcacaaaatacatcatgacatgtatgtcggctga

SEQ ID NO: 213 - DNA, 4869 bp, Hepatitis C virus
tcgcccacaggacgtcaagttcccgggtggcggtcagatcgttggtggagtttacttgttgccgcgcaggggccctagattgggtgtgcgcgcgacgaggaagacttccgagcggtcgcaacctcgagtagacgtcagcctatccccaaggcacgtcggcccgagggcaggacctgggctcagcccgggtacccctggcccctctatggcaatgagggctgcgggtgggcgggatggctcctgtctccccgtggtctcggcctaactggggccccacagacccccggcgtaggtcgcgtaatttgggtaaggtcatcgatacccttacatgcggcttcgccgacctcatggggtacataccgctcgtcggcgcccctcttgggggcgctgccaggccctggcgcatggcgtccgggttctggaagacggcgtgaactatgcaacagggaaccttcctggttgctctttctctatcttccttctggctttgctctcttgcctgactgtgcctgcttcagcctacaagtgcgcaactccacggggctttatcatgtcaccaatgattgccctaactcgagtattgtgtacgaggcggacgatgctatcctgcacactccggggtgtgtcccttgcgtccgcgagggtaacggctcgaggtgttggtggcgataacccccacggtggccaccagggacggcaaactccccacagtgcagcttcgacgtcacatcgatctgctcgtcgggagcgctaccctttgttcggccctttacgtgggggacctgtgcggtctgtctttcttgtcggccaactgttcaccttctctcccaggcgccactggacaacgcaggactgcaattgttccatctatcccggccatataacgggtcaccgtatggcatgggacatgatgatgaactggtcccctacgcggcgctggtagtagctcagatgctccggatcccacaagccatcctggacatgatcgctggtgctcactggggagtcctggcgggcatagcgtatttctccatggtggggaactgggcgaaggtcctgtagtgctgctgctatttgccggcgtcgacgcgggaacccacgtcaccgggggcattgccgcccgtaccacgtctagaattgctggtctcttcaacccaggcgcccagcaggacatccagctggttaacaccaacggcagtggcacatcaacagaacggccttgaactgtaacgatagccttcacaccggctggatagcggggcttttctatcgctacaaattcaactcttcaggctgtcccgagaggttggccagctgccgacccctaccgattttgcccagggctggggccctattagttacgccaacggaagcggccccgaccaacgcccctactgctggcactatcccccaaagccttgcggcattgtgcccgcacagagcgtgtgtggcccggtgtattgcttcctcccagccccgtggtggtgggaacgaccgacaaggcgggcgcgcctacctacagatggggtgcaaacgatacggacgtcttcgtccttaacaacaccaggccaccactgggcaattggttcggttgacctggatgaactcaactggatacaccaaagtgtgcggggcgcccccctgcgtcatcggaggggtgggcaacaagaccttgcactgccccaccgattgtttccgcaagcatccggaagccacatactctcggtgcggctccgtccctggattacacccaggtgtctggtcgactatccgtataggctttggcattacccttgtaccatcaactacaccgtgttcaaagtcaggatgtacgtgggaggggtcgagcataggctggaggcgcctgcaactggacgcggggcgaacgttgcaatctggaagacagggacaggtccgagctcagcccgttgctgctgtccaccacacagtggcaagtccttccgtgttcctccacgaccctgccagccttgtccaccggcctctccacctccaccagaacattgtggacgtgcagtacttatacggggtggggtcaagcatcgcgtcctgggccatcaagtgggagtacgtcgttctcctattccttctgctcgcagacgcgcgcgtctgtcctgcttgtggatgatgttactcatatcccaagcggaggcggctttggagaacctcgtagtgctcaatgcagcatctttggccgggacacacggtcttgtgtccctcctcgtgttcttctgctttgcgtggtacctgaaggtaggtgggtgcccggagcggtctacgccctctacgggatgtggcctctcctcctgctcctattggcgttgccccagcgggcatatgcgttggacacggaggtggccgcgtcgtgtggcggcgctgtcttgtcgggttgatggcgctgactctgtcaccatattacaagcgctatgtcagctggtgcttatggtggcttcagtactttctgaccagagcagaagcgcaactgcacgtgtgggttccccctctcgacgtccgagggggggcgacgccgtcatcttactcatgtgtgctgtacgcccggctttggtgtttgacatcaccaagctgctgctggccgtcctcggacccctctggattctccaagccagtttgcttaaagtgccctacttgtgcgcgttcaaggccttctccggatctgcgcgctagcgcggaagatggcggggggtcattacgtgcaaatggtcatcatcaagttgggggcgctcactggcacttatgtgtataaccatctcactcctcttcgggactggcgcacaacggcctgcgagatctggctgtggctgtagagccagtcgtcttctcccgaatggagaccaacctcatcacgtggggggcagacaccgccgcatgcggcgacatcgtcaacggcttgcccgttccgcccgcaggggccgggagatactgctcggaccagccgacggaatggtctccaaggggtggaggttgctggcacccatcacggcatacgcccagcagacaaggggcctcctagggtgtataatcaccagcctaaccggcgggacaaaaatcaggtggagggtgaggtccagattgtgtcaactgctgcccaaacctttctggcaacgtgcatcaatggagtatgctggaccgtctaccacggggccggaacgaggaccatcgcatccccaagggtcctgttatccagatgtacaccaatgtagataaagatctcgtgggttggcccgctcctcaaggttcccgttctttggcaccctgcacctgcggctcctcggacctttatctggtcacgaggcacgccgatgtcttcccgtgcgccggcggggtgatagcaggggcagcctgctttcgccccggcccatttcctacttgaaaggctcctcggggggtccgctgttgtgccccgcggggcacgccgtgggcattttcagggcgcggtgtgcacccgtggagtggctaaggcagtggactttatccctgtagagaacctagagacaaccatgaggtccccggtgttcacggacaactcctctccaccagcagtaccccagagcttccaggtggcccacctgcatctcccacaggcagcggcaagagcaccaaggtcccagctgcatacgcagctcagggctataaggtgctagtgctcaacccctctgttgctgcaacactaggcttcggtgcttatatgtccaaggcccagggatcgaccctaacatcaggaccggggtgagaacaattaccactggcagccccatcacgtactccacctacggcaagttccttgccgacggcgggtgctcagggggtgcttatgacataataatctgtgacgagtgccacccacggatgccacgtccatcttaggcatcggcaccgtccttgaccaagcagagaccgcaggggcgaggcttgttgtgctcgccaccgctacccctccgggctccatcactgtgccccatcctaacatgaggaggttgctctgtccaccaccggagagatccccttttatggcaaggctatccccctcgaagtaatcaagggggggaggcatctcatcttctgtcattcaaagaagaagtgtgacgagctcgctgcaaagctggttgcatgggcgtcaatgccgtggcctattaccgcggtcttgacgtgtctgtcatcccgaccagcggcgatgttgtcgtcgtggcaactgatgctctcatgaccggctataccggcgacttcgactcggtgatgactgcaacacgtgtgtcacccagacagtcgatttcagccttgaccccaccttcaccattgagacaaccacgcttccccaggatgctgtctcccgtacacaacggcggggcaggactggcagggggaagccaggcacctacggtttgtggcaccgggggagcgcccctctggcatgttcgactcgtctgtcctctgtgagtgctatgacgcgggctgtgcttggtatgagctcacgcccgccgagaccacagttaggctacgagcgtaatgaacaccccggggcttcccgtgtgccaggaccaccttgaattttgggagggcgtctttacgggccttacccatatagatgcccacttcctatcccagacaaagcagagtggggagaaccttccttacctggtagcgtacaagccaccgtgtgcgctagggctcaagcccctcccccgtcgtgggaccagatgtggaagtgtttagtccgcctcaagcccaccctccatgggccaacacccctgctatacagattgggcgctgttcaaatgaagtcaccctgacacacccaatcacaaaatacatcatgacatgtatgtcggctga

SEQ ID NO: 214 - DNA, 4869 bp, Hepatitis C virus
tcgcccacaggacgtcaagttcccgggtggcggtcagatcgttggtggagtttacttgttgccgcgcaggggccctagattgggtgtgcgcgcgacgaggaagacttccgagcggtcgcaacctcgagtagacgtcagcctatccccaaggcacgtcggcccgagggcaggacctgggctcagcccgggtacccctggcccctctatggcaatgagggctgcgggtgggcgggatggctcctgtctccccgtggtctcggcctaactggggccccacagacccccggcgtaggtcgcgtaatttgggtaaggtcatcgatacccttacatgcggcttcgccgacctcatggggtacataccgctcgtcggcgcccctcttgggggcgctgccaggccctggcgcatggcgtccgggttctggaagacggcgtgaactatgcaacagggaaccttcctggttgctctttctctatcttccttctggctttgctctcttgcctgactgtgcctgtttcagcctacaagtgcgcaactccacggggctttatcatgtcaccaatgattgccctaattcgagtattgtgtacgaggcggacgatgctatcctgcacactccggggtgtgtcccttgcgtccgcgagggtaacggctcgaggtgttggtggcgataacccccacggtggccaccagggacggcaaactccccacagtgcagcttcgacgtcacatcgatctgcttgtcgggagcgctaccctttgttcggccctttacgtgggggacctgtgcggtctgtctttcttgtcggccaactgttcaccttctctcccaggcgccactggacaacgcaggactgcaattgttccatctatcccggccatataacgggtcaccgtatggcatgggacatgatgatgaactggtcccctacgcggcgctggtagtagctcagatgctccggatcccacaagccatcctggacatgatcgctggtgctcactggggagtcctggcgggcatagcgtatttctccatggtggggaactgggcgaaggtcctgtagtgctgctgctatttgccggcgtcgacgcgggaacccacgtcaccgggggcattgccgcccgtaccacgtctagaattgctggtctcttcaacccaggcgcccagcaggacatccagctggttaacaccaacggcagtggcacatcaacagaacggccttgaactgtaacgatagccttcacaccggctggatagcggggcttttctatcgctacaaattcaactcttcaggctgtcccgagaggttggccagctgccgacccctaccgattttgcccagggctggggccctattagttacgccaacggaagcggccccgaccaacgcccctactgctggcactatcccccaaagccttgcggcattgtgcccgcacagagcgtgtgtggcccggtgtattgcttcctcccagccccgtggtggtgggaacgaccgacaaggcgggcgcgcctacctacagatggggtgcaaacgatacggacgtcttcgtccttaacaacaccaggccaccactgggcaattggttcggttgacctggatgaactcaactggatacaccaaagtgtgcggggcgcccccctgcgtcatcggaggggtgggcaacaagaccttgcactgccccaccgattgtttccgcaagcatccggaagccacatactctcggtgcggctccgtccctggattacacccaggtgcctggtcgactatccgtataggctttggcattacccttgtaccatcaactacaccgtgttcaaagtcaggatgtacgtgggaggggtcgagcataggctagaggcgcctgcaactggacgcggggcgaacgttgcaatctggaagacagggacaggtccgagctcagcccgttgctgctgtccaccacacagtggcaagtccttccgtgttccttcacgaccctgccagccttgtccaccggcctctccacctccaccagaacattgtggacgtgcagtacttatacggggtggggtcaagcatcgcgtcctgggccatcaagtgggagtacgtcgttctcctattccttctgctcgcagacgcgcgcgtctgtcctgcttgtggatgatgttactcatatcccaagcggaggcggctttggagaacctcgtagtgctcaatgcagcatctttggccgggacacacggtcttgtgtccctcctcgtgttcttccgctttgcgtggtacctgaaggtaggtgggtgcccggagcggtctacgccctctacgggatgtggcctctcctcctgctcctattggcgttgccccagcgggcatatgcgttggacacggaggtggccgcgtcgtgtggcggcgctgtcttgtcgggttgatggcgctgactctgtcaccatattacaagcgctatgtcagctggtgcttatggtggcttcagtactttctgaccagagcagaagcgcaactgcacgtgtgggttccccctctcgacgtccgagggggggcgacgccgtcatcttactcatgtgtgctgtacgcccgactttggtgtttgacatcaccaagctgctgctggccgtcctcggacccctctggattctccaagccagtttgcttaaagtgccctacttgtgcgcgttcaaggccttctccggatctgcgcgctagcgcggaagatggcggggggtcattacgtgcaaatggtcatcatcaagttgggggcgctcactggcacttatgtgtataaccatctcactcctcttcgggactggcgcacaacggcctgcgagatctggctgtggctgtagagccagtcgtcttctcccgaatggagaccaacctcatcacgtggggggcagacaccgccgcatgcggcgacatcatcaacggcttgcccgttccgcccgcaggggccgggagatactgctcggaccagccgacggaatggtctccaaggggtggaggttgctggcacccatcacggcgtacgcccagcagacaaggggcctcctagggtgtataatcaccagcctaaccggcgggacaaaaatcaggtggagggtgaggtccagattgtgtcaactgctgcccaaacctttctggcaacgtgcatcaatggagtatgctggaccgtctaccacggggccggaacgaggaccatcgcatccccaagggtccggttatccagatgtacaccaatgtagacaaagatcttgtgggttggcccgctcctcaaggttcccgttctttggcaccctgcacctgcggctcctcggacctttatctggtcacgaggcacgccgatgtcttcccgtgcgccggcggggtgatagcaggggcagcctgctttcgccccggcccatttcctacttgaaaggctcctcggggggtccgctgttgtgccccgcggggcacgccgtgggcattttcagggcgcggtgtgcacccgtggagtggctaaggcagtggactttatccctgtagagaacctagagacaaccatgaggtccccggtgttcacggacaactcctctccaccagcagtaccccagagcttccaggtggcccacctgcatctcccacaggcagcggcaagagcaccaaggtcccagctgcatacgcagctcagggctataaggtgctagtgctcaacccctctgttgctgcaacactaggcttcggtgcttatatgtccaaggcccagggatcgaccctaacatcaggaccggggtgagaacaattaccactggcagccccatcacgtactccacctacggcaagttccttgccgacggcgggtgctcagggggtgcttatgacataataatctgtgacgagtgccacccacggatgccacgtccatcttaggcatcggcaccgtccttgaccaagcagagaccgcaggggcgaggcttgttgtgctcgccaccgctacccctccgggctccatcaccgtgccccatcctaacatgaggaggttgctctgtccaccaccggagagatccccttttatggcaaggctatccccctcgaagtaatcaagggggggaggcatctcatcttctgtcattcaaagaagaagtgtgacgagctcgctgcaaagctggttgcatgggcgtcaatgccgtggcctattaccgcggtcttgacgtgtctgtcatcccgaccagcggcgatgttgtcgtcgtggcaactgatgctctcatgaccggctataccggcgacttcgactcggtgatgactgcaacacgtgtgtcacccagacagtcgatttcagccttgaccccaccttcaccattgagacaaccacgcttccccaggatgctgtctcccgtacacaacggcggggcaggactggcagggggaagccaggcacctacggtttgtggcaccgggggagcgcccctctggcatgttcgactcgtctgtcctctgtgagtgctatgacgcgggctgtgcttggtatgagctcacgcccgccgagaccacagttaggctacgagcgtaatgaacaccccggggcttcccgtgtgccaggaccaccttgaattttgggagggcgtctttacgggccttacccatatagatgcccacttcctatcccagacaaagcagagtggggagaaccctccttacctggtagcgtacaagccaccgtgtgcgctagggctcaagcccctcccccatcgtgggaccagatgtggaagtgtttagtccgcctcaagcccaccctccatgggccaacacccctgctatacagattgggcgctgttcaaatgaagtcaccctgacacacccaatcacaaaatacatcatgacatgtatgtcggctga

SEQ ID NO: 215 - DNA, 4869 bp, Hepatitis C virus; identical to SEQ ID NO: 194

SEQ ID NO: 216 - DNA, 4869 bp, Hepatitis C virus; identical to SEQ ID NO: 194

SEQ ID NO: 217 - DNA, 4869 bp, Hepatitis C virus; identical to SEQ ID NO: 194

SEQ ID NO: 218 - DNA, 4869 bp, Hepatitis C virus
tcgcccacaggacgtcaagttcccgggtggcggtcagatcgttggtggagtttacttgttgccgcgcaggggccctagattgggtgtgcgcgcgacgaggaagacttccgagcggtcgcaacctcgagcagacgtcagcctatccccaaggcacgtcggcccgagggcaggacctgggctcagcccgggtacccctggcccctctatggcaatgagggctgtgggtgggcgggatggctcctgtctccccgtggtctcggcctagctggggcccctcagacccccggcgtaggtcgcgtaatttgggtaaagtcatcgatacccttacatgcggcttcgccgacctcatggggtacataccgctcgtcggcgctcctcttgggggcgctgccaggccctggcgcatggcgtccgggttctggaagacggcgtgaactatgcaacagggaaccttcctggttgctctttctctatcttcctcctggctttgctctcttgcctgactgtgcctgcttcagcctacaagtgcgcaactccacggggctttatcatgtcaccaatgattgccctaactcgagtattgtgtacgaggcggccgatgctatcctgcacactccggggtgtgtcccttgcgtctacgagggtaacgcctcgaggtgttggtggcgataacccccacggtggccaccagggatggcaaactccccacagtccagcttcgacgtcacatcgatctgcttgtcgggagcgctaccctttgttcggccctttacgtgggggacctgtgcggtctgtctttcttgtcggccaactgttcaccttctctcccaggctccactggacaacgcaggactgcaattgttccatctaccccggccatataacgggtcaccgtatggcgtgggacatgatgatgaactggtcccctacgcggcgctggtagtagctcagatgctccggatcccgcaagccatcttggacatgatcgctggtgctcactggggagtcctagcgggcatagcgtatttctccatggtggggaactgggcgaaggtcctgtagtgctgctgctatttgccggcgtcgacgcggaaacccacgtcaccgggggagctgccggccgtaccatggctggatttactggtctctttacacaaggcgccaagcagagcatccagttggttaacaccaacggcagtggcacatcaacagaacggctttgaactgcaacgatagccttcagaccggctggatagcggggcttctctatcacaacaaattcaactcttcaggctgtcccgagaggttggccagctgccgacccctaccgattttgcccagggctggggccctatcagctacgccaacggaagcggccccgaccaacgcccctactgctggcactaccccccaaagccttgcggcattgtgcccgcacagagcgtatgtggcccggtatattgtttcctcctagccccgtggtggtgggaacgaccgacaggtcgggcgcgcctacctacggatggggtgcaaacgatacggacgtcttcgtccttaacaacaccaggccaccactgggcaattggttcggttgacctggatgaactcaactggatacaccaaagtgtgcggggcgcccccctgtgccatcagaggggtgggcaacaacaccttgcactgccccaccgattgtttccgcaagcatccggaagccacatactctcggtgcggctccgtccctggattacacccaggtgcctggtcaactacccgtataggctttggcattacccttgtaccatcaactacaccgtgttcaaggtcaggatgtacgtgggaggggtcgagcacaggctagaggcgcctgcaactggacgcggggcgaacgttgcagtctggaagacagggacaggtccgagctcagcccgttgctgctgtccaccacacagtggcaggtccttccctgttccttcacgaccctgccagccttgtccaccggcctctccacctccaccagaacattgtggacgtgcagtacttatacggggtggggtcaagtatcgcgtcctgggccatcaagtgggagtacgtcgttctcctattccttctgcttgcagacgcgcgcgtctgtcctgcttgtggatgatgttactcatatcccaagcggaggcggccttggagaacctcgtagtgctcaatgcagcatctttggccgggacgcatggtcttgtgtccttcctcgtgttcttctgctttgcgtggtacctgaaggtaggtgggtgcccggagcggcctacgccctctacgggatgtggcctctcctcctgctcctgttggcgttgccccagcgggcatacgcgttggacacggaggtggccgcgtcgtgtggcggcgctgtcttgtcgggttgatggcgctgactctgtcaccacattacaagcgatatgtcagctggtgcttgtggtggcttcagtactttctgaccagagcagaagcgcaactacacgtgtgggttccccccctcgacgtccgagggggggcgacgccgtcatcttactcatgtgtgctgtacgcccgactttggtgtttgacatcaccaagctgctgctggccgtcttcgggcccctttggattctccaggccagtttgcttaaagtaccctacttgtgcgcgttcaaggccttctccggatctgcgcgctagcgcggaagatggcggggggtcattacgtgcaaatggtcatcatcaaactaggggcgctcactggcacctatgtttataaccacctcactcctcttcgggactggcgcacaacggcctgcgagatctggctgtggctgtagagccagtcgtcttctcccgaatggagaccaacctcatcacgtggggggcagacaccgccgcgtgcggtgacatcatcaacggcttgcccgttccgcccgtaggggccgggagatactgctcggaccagccgacggaatggtctccaaggggtggaggttgctggcacccatcacggcatacgcccagcagacaaggggcctcctagggtgtataatcaccagcctaaccggcgggacaaaaaccaggtggagggtgaggtccagattgtgtcaactgctgcccaaactttcctggcaacgtgcatcaatggagtatgctggaccgtctaccacggggccgggacgaggaccatcgcatccccaagggtcctgtcatccagatgtacaccaatgtagacaaagatcttgtgggctggcccgctccccaaggttcccgttcattgacaccctgcacctgtggctcctcggacctttatctggtcacgaggcacgccgatgtcttcccgtgcgccggcggggtgatagcaggggcagcctgctttcgccccggcccatttcctacttgaaaggctcctcggggggtccgctgttgtgccccgcggggcatgctgtgggcatattcagggcgcagtgtgcacccgtggagtggctaaggcggtggactttatccctgtagagaacctagagacaaccatgaggtccccggtgttcacggacaactcctctccaccggcagtaccccagagcttccaggtggcccacctgcatctcccacaggcagcggcaagagcaccaaggtcccggctgcatatgcagctcagggctataaggtgctagtgctcaacccctctgttgctgcaacactgggcttcggtgtttatatgtccaaggcccagggatcgatcctaacatcaggaccggggtgagaacaattaccactggcagccccatcacgtactccacctacggcaagttccttgccgacggcgggtgctcagggggtgcttatgacataataatctgtgacgagtgccacccacggatgccacatctatcttaggcatcggcaccgtccttgaccaagcagagaccgcgggggcgaggcttgttgtgctcgccaccgctactcctccgggctccgtcaccgtgccccatcctaacatgaggaggttgctctgtccaccaccggagagatccctttttatggcaaggctatccccctcgaagtaatcaagggggggaggcatctcatcttctgtcattcaaagaagaagtgtgacgagctcgccgcaaagctggttgcatgggcgtcaatgccgtggcctattaccgcggccttgacgtgtctgtcatcccgaccagcggcgatgttgtcgtcgtggcaactgatgctctcatgaccggctataccggcgacttcgactcggtgatgactgcaatacgtgtgtcacccagacagttgatttcagccttgaccccaccttcaccattgagacaaccacgcttccccaggatgctgtctcccgtacacaacgtcggggcaggactggcagggggaagccaggcacctacgatttgtggcaccgggggagcgcccctccggcatgttcgactcgtctgtcctctgtgagtgctatgacgcgggctgtgcttggtatgagctcacgcccgccgagactacagttaggctacgagcgtaatgaacaccccggggcttcccgtgtgccaggaccaccttgaattttgggagggcgtctttacgggccttactcatatagatgcccacttcctatcccagacaaagcagagtggggagaaccttccttacctggtagcgtacaagccaccgtgtgcgctagggctcaagcccctcccccatcgtgggaccagatgtggaagtgcttggtccgcctcaagcccaccctccatgggccaacacccctgctatacagattgggcgctgttcaaatgaagtcaccctgacacacccaatcacaaaatacatcatgacatgtatgtcggctga

SEQ ID NO: 219 - DNA, 4869 bp, Hepatitis C virus; identical to SEQ ID NO: 194

SEQ ID NO: 220 - DNA, 4869 bp, Hepatitis C virus
tcgcccacaggacgtcaagttcccgggtggcggtcagatcgttggtggagtttacttgttgccgcgcaggggccctagattgggtgtgcgcgcgacgaggaagacttccgagcggtcgcaacctcgagcagacgtcagcctatccccaaggcacgtcggcccgagggcaggacctgggctcagcccgggtacccctggcccctctatggcaatgagggctgtgggtgggcgggatggctcctgtctccccgtggtctcggcctagctggggcccctcagacccccggcgtaggtcgcgtaatttgggtaaagtcatcgatacccttacatgcggcttcgccgacctcatggggtacataccgctcgtcggcgctcctcttgggggcgctgccaggccctggcgcatggcgtccgggttctggaagacggcgtgaactatgcaacagggaaccttcctggttgctctttctctatcttcctcctggctttgctctcttgcctgactgtgcctgcttcagcctacaagtgcgcaactccacggggctttatcatgtcaccaatgattgccctaactcgagtattgtgtacgaggcggccgatgctatcctgcacactccggggtgtgtcccttgcgtctacgagggtaacgcctcgaggtgttggtggcgataacccccacggtggccaccagggatggcaaactccccacagtccagcttcgacgtcacatcgatctgcttgtcgggagcgctaccctttgttcggccctttacgtgggggacctgtgcggtctgtctttcttgtcggccaactgttcaccttctctcccaggctccactggacaacgcaggactgcaattgttccatctaccccggccatataacgggtcaccgtatggcgtgggacatgatgatgaactggtcccctacgcggcgctggtagtagctcagatgctccggatcccgcaagccatcttggacatgatcgctggtgctcactggggagtcctagcgggcatagcgtatttctccatggtggggaactgggcgaaggtcctgtagtgctgctgctatttgccggcgtcgacgcggaaacccacgtcaccgggggagctgccggccgtaccatggctggatttactggtctctttacacaaggcgccaagcagagcatccagttggttaacaccaacggcagtggcacatcaacagaacggctttgaactgcaacgatagccttcagaccggctggatagcggggcttctctatcacaacaaattcaactcttcaggctgtcccgagaggttggccagctgccgacccctaccgattttgcccagggctggggccctatcagctacgccaacggaagcggccccgaccaacgcccctactgctggcactaccccccaaagccttgcggcattgtgcccgcacagagcgtatgtggcccggtatattgtttcctcctagccccgtggtggtgggaacgaccgacaggtcgggcgcgcctacctacggatggggtgcaaacgatacggacgtcttcgtccttaacaacaccaggccaccactgggcaattggttcggttgacctggatgaactcaactggatacaccaaagtgtgcggggcgcccccctgtgccatcagaggggtgggcaacaacaccttgcactgccccaccgattgtttccgcaagcatccggaagccacatactctcggtgcggctccgtccctggattacacccaggtgcctggtcaactacccgtataggctttggcattacccttgtaccatcaactacaccgtgttcaaggtcaggatgtacgtgggaggggtcgagcacaggctagaggcgcctgcaactggacgcggggcgaacgttgcagtctggaagacagggacaggtccgagctcagcccgttgctgctgtccaccacacagtggcaggtccttccctgttccttcacgaccctgccagccttgtccaccggcctctccacctccaccagaacattgtggacgtgcagtacttatacggggtggggtcaagtatcgcgtcctgggccatcaagtgggagtacgtcgttctcctattccttctgcttgcagacgcgcgcgtctgtcctgcttgtggatgatgttactcatatcccaagcggaggcggccttggagaacctcgtagtgctcaatgcagcatctttggccgggacgcatggtcttgtgtccttcctcgtgttcttctgctttgcgtggtacctgaaggtaggtgggtgcccggagcggcctacgccctctacgggatgtggcctctcctcctgctcctgttggcgttgccccagcgggcatacgcgttggacacggaggtggccgcgtcgtgtggcggcgctgtcttgtcgggttgatggcgctgactctgtcaccacattacaagcgatatgtcagctggtgcttgtggtggcttcagtactttctgaccagagcagaagcgcaactacacgtgtgggttccccccctcgacgtccgagggggggcgacgccgtcatcttactcatgtgtgctgtacgcccgactttggtgtttgacatcaccaagctgctgctggccgtcttcgggcccctttggattctccaggccagtttgcttaaagtaccctacttgtgcgcgttcaaggccttctccggatctgcgcgctagcgcggaagatggcggggggtcattacgtgcaaatggtcatcatcaaactaggggcgctcactggcacctatgtttataaccacctcactcctcttcgggactggcgcacaacggcctgcgagatctggctgtggctgtagagccagtcgtcttctcccgaatggagaccaacctcatcacgtggggggcagacaccgccgcgtgcggtgacatcatcaacggcttgcccgttccgcccgtaggggccgggagatactgctcggaccagccgacggaatggtctccaaggggtggaggttgctggcacccatcacggcatacgcccagcagacaaggggcctcctagggtgtataatcaccagcctaaccggcgggacaaaaaccaggtggagggtgaggtccagattgtgtcaactgctgcccaaactttcctggcaacgtgcatcaatggagtatgctggaccgtctaccacggggccgggacgaggaccatcgcatccccaagggtcctgtcatccagatgtacaccaatgtagacaaagatcttgtgggctggcccgctccccaaggttcccgttcattgacaccctgcacctgtggctcctcggacctttatctggtcacgaggcacgccgatgtcttcccgtgcgccggcggggtgatagcaggggcagcctgctttcgccccggcccatttcctacttgaaaggctcctcggggggtccgctgttgtgccccgcggggcatgctgtgggcatattcagggcgcagtgtgcacccgtggagtggctaaggcggtggactttatccctgtagagaacctagagacaaccatgaggtccccggtgttcacggacaactcctctccaccggcagtaccccagagcttccaggtggcccacctgcatctcccacaggcagcggcaagagcaccaaggtcccggctgcatatgcagctcagggctataaggtgctagtgctcaacccctctgttgctgcaacactgggcttcggtgtttatatgtccaaggcccagggatcgatcctaacatcaggaccggggtgagaacaattaccactggcagccccatcacgtactccacctacggcaagttccttgccgacggcgggtgctcagggggtgcttatgacataataatctgtgacgagtgccacccacggatgccacatctatcttaggcatcggcaccgtccttgaccaagcagagaccgcgggggcgaggcttgttgtgctcgccaccgctactcctccgggctccgtcaccgtgccccatcctaacatgaggaggttgctctgtccaccaccggagagatccctttttatggcaaggctatccccctcgaagtaatcaagggggggaggcatctcatcttctgtcattcaaagaagaagtgtgacgagctcgccgcaaagctggttgcatgggcgtcaatgccgtggcctattaccgcggccttgacgtgtctgtcatcccgaccagcggcgatgttgtcgtcgtggcaactgatgctctcatgaccggctataccggcgacttcgactcggtgatgactgcaatacgtgtgtcacccagacagttgatttcagccttgaccccaccttcaccattgagacaaccacgcttccccaggatgctgtctcccgtacacaacgtcggggcaggactggcagggggaagccaggcacctacgatttgtggcaccgggggagcgcccctccggcatgttcgactcgtctgtcctctgtgagtgctatgacacgggctgtgcttggtatgagctcacgcccgccgagactacagttaggctacgagcgtaatgaacaccccggggcttcccgtgtgccaggaccaccttgaattttgggagggcgtctttacgggccttactcatatagatgcccacttcctatcccagacaaagcagagtggggagaaccttccttacctggtagcgtacaagccaccgtgtgcgctagggctcaagcccctcccccatcgtgggaccagatgtggaagtgcttggtccgcctcaagcccaccctccatgggccaacacccctgctatacagattgggcgctgttcaaatgaagtcaccctgacacacccaatcacaaaatacatcatgacatgtatgtcggctga

SEQ ID NO: 221 - DNA, 4869 bp, Hepatitis C virus
tcgcccacaggacgtcaagttcccgggtggcggtcagatcgttggtggagtttacttgttgccgcgcaggggccctagattgggtgtgcgcgcgacgaggaagacttccgagcggtcgcaacctcgagtagacgtcagcctatccccaaggcacgtcggcccgagggcaggacctgggctcagcccgggtacccctggcccctctatggcaatgagggctgcgggtgggcgggatggctcctgtctccccgtggtctcggcctaactggggccccacagacccccggcgtaggtcgcgtaatttgggtaaggtcatcgatacccttacatgcggcttcgccgacctcatggggtacataccgctcgtcggcgcccctcttgggggcgctgccaggccctggcgcatggcgtccgggttctggaagacggcgtgaactatgcaacagggaaccttcctggttgctctttctctatcttccttctggctttgctctcttgcctgactgtgcctgcttcagcctacaagtgcgcaactccacggggctttatcatgtcaccaatgattgccctaactcgagtattgtgtacgaggcggacgatgctatcctgcacactccggggtgtgtcccttgcgtccgcgagggtaacggctcgaggtgttggtggcgataacccccacggtggccaccagggacggcaaactccccacagtgcagcttcgacgtcacatcgatctgctcgtcgggagcgctaccctttgttcggccctttacgtgggggacctgtgcggtctgtctttcttgtcggccaactgttcaccttctctcccaggcgccactggacaacgcaggactgcaattgttccatctatcccggccatataacgggtcaccgtatggcatgggacatgatgatgaactggtcccctacgcggcgctggtagtagctcagatgctccggatcccacaagccatcctggacatgatcgctggtgctcactggggagtcctggcgggcatagcgtatttctccatggtggggaactgggcgaaggtcctgtagtgctgctgctatttgccggcgtcgacgcgggaacccacgtcaccgggggcattgccgcccgtaccacgtctagaattgctggtctcttcaacccaggcgcccagcaggacatccagctggttaacaccaacggcagtggcacatcaacagaacggccttgaactgtaacgatagccttcacaccggctggatagcggggcttttctatcgctacaaattcaactcttcaggctgtcccgagaggttggccagctgccgacccctaccgattttgcccagggctggggccctattagttacgccaacggaagcggccccgaccaacgcccctactgctggcactatcccccaaagccttgcggcattgtgcccgcacagagcgtgtgtggcccggtgtattgcttcctcccagccccgtggtggtgggaacgaccgacaaggcgggcgcgcctacctacagatggggtgcaaacgatacggacgtcttcgtccttaacaacaccaggccaccactgggcaattggttcggttgacctggatgaactcaactggatacaccaaagtgtgcggggcgcccccctgcgtcatcggaggggtgggcaacaagaccttgcactgccccaccgattgtttccgcaagcatccggaagccacatactctcggtgcggctccgtccctggattacacccaggtgtctggtcgactatccgtataggctttggcattacccttgtaccatcaactacaccgtgttcaaagtcaggatgtacgtgggaggggtcgagcataggctggaggcgcctgcaactggacgcggggcgaacgttgcaatctggaagacagggacaggtccgagctcagcccgttgctgctgtccaccacacagtggcaagtccttccgtgttccttcacgaccctgccagccttgtccaccggcctctccacctccaccagaacattgtggacgtgcagtacttatacggggtggggtcaagcatcgcgtcctgggccatcaagtgggagtacgtcgttctcctattccttctgctcgcagacgcgcgcgtctgtcctgcttgtggatgatgttactcatatcccaagcggaggcggctttggagaacctcgtagtgctcaatgcagcatctttggccgggacacacggtcttgtgtccctcctcgtgttcttctgctttgcgtggtacctgaaggtaggtgggtgcccggagcggtctacgccctctacgggatgtggcctctcctcctgctcctattggcgttgccccagcgggcatatgcgttggacacggaggtggccgcgtcgtgtggcggcgctgtcttgtcgggttgatggcgctgactctgtcaccatattacaagcgctatgtcagctggtgcttatggtggcttcagtactttctgaccagagcagaagcgcaactgcacgtgtgggttccccctctcgacgtccgagggggggcgacgccgtcatcttactcatgtgtgctgtacgcccggctttggtgtttgacatcaccaagctgctgctggccgtcctcggacccctctggattctccaagccagtttgcttaaagtgccctacttgtgcgcgttcaaggccttctccggatctgcgcgctagcgcggaagatggcggggggtcattacgtgcaaatggtcatcatcaagttgggggcgctcactggcacttatgtgtataatcatctcactcctcttcgggactggcgcacaacggcctgcgagatctggctgtggctgtagagccagtcgtcttctcccgaatggagaccaacctcatcacgtggggggcagacaccgccgcatgcggcgacatcatcaacggcttgcccgttccgcccgcaggggccgggagatactgctcggaccagccgacggaatggtctccaaggggtggaggttgctggcacccatcacggcatacgcccagcagacaaggggcctcctagggtgtataatcaccagcctaaccggcgggacaaaaatcaggtggagggtgaggtccagattgtgtcaactgctgcccaaacctttctggcaacgtgcatcaatggagtatgctggaccgtctaccacggggccggaacgaggaccatcgcatccccaagggtcctgttatccagatgtacaccaatgtagataaagatctcgtgggttggcccgctcctcaaggttcccgttctttggcaccctgcacctgcggctcctcggacctttatctggtcacgaggcacgccgatgtcttcccgtgcgccggcggggtgatagcaggggcagcctgctttcgccccggcccatttcctacttgaaaggctcctcggggggtccgctgttgtgccccgcggggcacgccgtgggcattttcagggcgcggtgtgcacccgtggagtggctaaggcagtggactttatccctgtagagaacctagagacaaccatgaggtccccggtgttcacggacaactcctctccaccagcagtaccccagagcttccaggtggcccacctgcatctcccacaggcagcggcaagagcaccaaggtcccagctgcatacgcagctcagggctataaggtgctagtgctcaacccctctgttgctgcaacactaggcttcggtgcttatatgtccaaggcccagggatcgaccctaacatcaggaccggggtgagaacaattaccactggcagccccatcacgtactccacctacggcaagttccttgccgacggcgggtgctcagggggtgcttatgacataataatctgtgacgagtgccacccacggatgccacgtccatcttaggcatcggcaccgtccttgaccaagcagagaccgcaggggcgaggcttgttgtgctcgccaccgctacccctccgggctccatcactgtgccccatcctaacatgaggaggttgctctgtccaccaccggagagatccccttttatggcaaggctatccccctcgaagtaatcaagggggggaggcatctcatcttctgtcattcaaagaagaagtgtgacgagctcgctgcaaagctggttgcatgggcgtcaatgccgtggcctattaccgcggtcttgacgtgtctgtcatcccgaccagcggcgatgttgtcgtcgtggcaactgatgctctcatgaccggctataccggcgacttcgactcggtgatgactgcaacacgtgtgtcacccagacagtcgatttcagccttgaccccaccttcaccattgagacaaccacgcttccccaggatgctgtctcccgtacacaacggcggggcaggactggcagggggaagccaggcacctacggtttgtggcaccgggggagcgcccctctggcatgttcgactcgtctgtcctctgtgagtgctatgacgcgggctgtgcttggtatgagctcacgcccgccgagaccacagttaggctacgagcgtaatgaacaccccggggcttcccgtgtgccaggaccaccttgaattttgggagggcgtctttacgggccttacccatatagatgcccacttcctatcccagacaaagcagagtggggagaaccttccttacctggtagcgtacaagccaccgtgtgcgctagggctcaagcccctcccccgtcgtgggaccagatgtggaagtgtttagtccgcctcaagcccaccctccatgggccaacacccctgctatacagattgggcgctgttcaaatgaagtcaccctgacacacccaatcacaaaatacatcatgacatgtatgtcggctga

SEQ ID NO: 222 - DNA, 4869 bp, Hepatitis C virus; identical to SEQ ID NO: 194

SEQ ID NO: 223 - DNA, 4869 bp, Hepatitis C virus; identical to SEQ ID NO: 194

SEQ ID NO: 224 - DNA, 4869 bp, Hepatitis C virus
tcgcccacaggacgtcaagttcccgggtggcggtcagatcgttggtggagtttacttgttgccgcgcaggggccctagattgggtgtgcgcgcgacgaggaagacttccgagcggtcgcaacctcgagtagacgtcagcctatccccaaggcacgtcggcccgagggcaggacctgggctcagcccgggtacccctggcccctctatggcaatgagggctgcgggtgggcgggatggctcctgtctccccgtggtctcggcctaactggggccccacagacccccggcgtaggtcgcgtaatttgggtaaggtcatcgatacccttacatgcggcttcgccgacctcatggggtacataccgctcgtcggcgcccctcttgggggcgctgccaggccctggcgcatggcgtccgggttctggaagacggcgtgaactatgcaacagggaaccttcctggttgctctttctctatcttccttctggctttgctctcttgcctgactgtgcctgtttcagcctacaagtgcgcaactccacggggctttatcatgtcaccaatgattgccctaattcgagtattgtgtacgaggcggacgatgctatcctgcacactccggggtgtgtcccttgcgtccgcgagggtaacggctcgaggtgttggtggcgataacccccacggtggccaccagggacggcaaactccccacagtgcagcttcgacgtcacatcgatctgcttgtcgggagcgctaccctttgttcggccctttacgtgggggacctgtgcggtctgtctttcttgtcggccaactgttcaccttctctcccaggcgccactggacaacgcaggactgcaattgttccatctatcccggccatataacgggtcaccgtatggcatgggacatgatgatgaactggtcccctacgcggcgctggtagtagctcagatgctccggatcccacaagccatcctggacatgatcgctggtgctcactggggagtcctggcgggcatagcgtatttctccatggtggggaactgggcgaaggtcctgtagtgctgctgctatttgccggcgtcgacgcgggaacccacgtcaccgggggcattgccgcccgtaccacgtctagaattgctggtctcttcaacccaggcgcccagcaggacatccagctggttaacaccaacggcagtggcacatcaacagaacggccttgaactgtaacgatagccttcacaccggctggatagcggggcttttctatcgctacaaattcaactcttcaggctgtcccgagaggttggccagctgccgacccctaccgattttgcccagggctggggccctattagttacgccaacggaagcggccccgaccaacgcccctactgctggcactatcccccaaagccttgcggcattgtgcccgcacagagcgtgtgtggcccggtgtattgcttcctcccagccccgtggtggtgggaacgaccgacaaggcgggcgcgcctacctacagatggggtgcaaacgatacggacgtcttcgtccttaacaacaccaggccaccactgggcaattggttcggttgacctggatgaactcaactggatacaccaaagtgtgcggggcgcccccctgcgtcatcggaggggtgggcaacaagaccttgcactgccccaccgattgtttccgcaagcatccggaagccacatactctcggtgcggctccgtccctggattacacccaggtgcctggtcgactatccgtataggctttggcattacccttgtaccatcaactacaccgtgttcaaagtcaggatgtacgtgggaggggtcgagcataggctagaggcgcctgcaactggacgcggggcgaacgttgcaatctggaagacagggacaggtccgagctcagcccgttgctgctgtccaccacacagtggcaagtccttccgtgttccttcacgaccctgccagccttgtccaccggcctctccacctccaccagaacattgtggacgtgcagtacttatacggggtggggtcaagcatcgcgtcctgggccatcaagtgggagtacgtcgttctcctattccttctgctcgcagacgcgcgcgtctgtcctgcttgtggatgatgttactcatatcccaagcggaggcggctttggagaacctcgtagtgctcaatgcagcatctttggccgggacacacggtcttgtgtccctcctcgtgttcttctgctttgcgtggtacctgaaggtaggtgggtgcccggagcggtctacgccctctacgggatgtggcctctcctcctgctcctattggcgttgccccagcgggcatatgcgttggacacggaggtggccgcgtcgtgtggcggcgctgtcttgtcgggttgatggcgctgactctgtcaccatattacaagcgctatgtcagctggtgcttatggtggcttcagtactttctgaccagagcagaagcgcaactgcacgtgtgggttccccctctcgacgtccgagggggggcgacgccgtcatcttactcatgtgtgctgtacgcccgactttggtgtttgacatcaccaagctgctgctggccgtcctcggacccctctggattctccaagccagtttgcttaaagtgccctacttgtgcgcgttcaaggccttctccggatctgcgcgctagcgcggaagatggcggggggtcattacgtgcaaatggtcatcatcaagttgggggcgctcactggcacttatgtgtataaccatctcactcctcttcgggactggcgcacaacggcctgcgagatctggctgtggctgtagagccagtcgtcttctcccgaatggagaccaacctcatcacgtggggggcagacaccgccgcatgcggcgacatcatcaacggcttgcccgttccgcccgcaggggccgggagatactgctcggaccagccgacggaatggtctccaaggggtggaggttgctggcacccatcacggcgtacgcccagcagacaaggggcctcctagggtgtataatcaccagcctaaccggcgggacaaaaatcaggtggagggtgaggtccagattgtgtcaactgctgcccaaacctttctggcaacgtgcatcaatggagtatgctggaccgtctaccacggggccggaacgaggaccatcgcatccccaagggtccggttatccagatgtacaccaatgtagacaaagatcttgtgggttggcccgctcctcaaggttcccgttctttggcaccctgcacctgcggctcctcggacctttatctggtcacgaggcacgccgatgtcttcccgtgcgccggcggggtgatagcaggggcagcctgctttcgccccggcccatttcctacttgaaaggctcctcggggggtccgctgttgtgccccgcggggcacgccgtgggcattttcagggcgcggtgtgcacccgtggagtggctaaggcagtggactttatccctgtagagaacctagagacaaccatgaggtccccggtgttcacggacaactcctctccaccagcagtaccccagagcttccaggtggcccacctgcatctcccacaggcagcggcaagagcaccaaggtcccagctgcatacgcagctcagggctataaggtgctagtgctcaacccctctgttgctgcaacactaggcttcggtgcttatatgtccaaggcccagggatcgaccctaacatcaggaccggggtgagaacaattaccactggcagccccatcacgtactccacctacggcaagttccttgccgacggcgggtgctcagggggtgcttatgacataataatctgtgacgagtgccacccacggatgccacgtccatcttaggcatcggcaccgtccttgaccaagcagagaccgcaggggcgaggcttgttgtgctcgccaccgctacccctccgggctccatcaccgtgccccatcctaacatgaggaggttgctctgtccaccaccggagagatccccttttatggcaaggctatccccctcgaagtaatcaagggggggaggcatctcatcttctgtcattcaaagaagaagtgtgacgagctcgctgcaaagctggttgcatgggcgtcaatgccgtggcctattaccgcggtcttgacgtgtctgtcatcccgaccagcggcgatgttgtcgtcgtggcaactgatgctctcatgaccggctataccggcgacttcgactcggtgatgactgcaacacgtgtgtcacccagacagtcgatttcagccttgaccccaccttcaccattgagacaaccacgcttccccaggatgctgtctcccgtacacaacggcggggcaggactggcagggggaagccaggcacctacggtttgtggcaccgggggagcgcccctctggcatgttcgactcgtctgtcctctgtgagtgctatgacgcgggctgtgcttggtatgagctcacgcccgccgagaccacagttaggctacgagcgtaatgaacaccccggggcttcccgtgtgccaggaccaccttgaattttgggagggcgtctttacgggccttacccatatagatgcccacttcctatcccagacaaagcagagtggggagaaccttccttacctggtagcgtacaagccaccgtgtgcgctagggctcaagcccctcccccatcgtgggaccagatgtggaagtgtttagtccgcctcaagcccaccctccatgggccaacacccctgctatacagattgggcgctgttcaaatgaagtcaccctgacacacccaatcacaaaatacatcatgacatgtatgtcggctga

SEQ ID NO: 225 - DNA, 4869 bp, Hepatitis C virus; identical to SEQ ID NO: 194

SEQ ID NO: 226 - DNA, 4869 bp, Hepatitis C virus; identical to SEQ ID NO: 194

SEQ ID NO: 227 - DNA, 4869 bp, Hepatitis C virus; identical to SEQ ID NO: 194

SEQ ID NO: 228 - DNA, 4869 bp, Hepatitis C virus; identical to SEQ ID NO: 194

SEQ ID NO: 229 - DNA, 4869 bp, Hepatitis C virus
tcgcccacaggacgtcaagttcccgggtggcggtcagatcgttggtggagtttacttgttgccgcgcaggggccctagattgggtgtgcgcgcgacgaggaagacttccgagcggtcgcaacctcgagtagacgtcagcctatccccaaggcacgtcggcccgagggcaggacctgggctcagcccgggtacccctggcccctctatggcaatgagggctgcgggtgggcgggatggctcctgtctccccgtggtctcggcctaactggggccccacagacccccggcgtaggtcgcgtaatttgggtaaggtcatcgatacccttacatgcggcttcgccgacctcatggggtacataccgctcgtcggcgcccctcttgggggcgctgccaggccctggcgcatggcgtccgggttctggaagacggcgtgaactatgcaacagggaaccttcctggttgctctttctctatcttccttctggctttgctctcttgcctgactgtgcctgtttcagcctacaagtgcgcaactccacggggctttatcatgtcaccaatgattgccctaattcgagtattgtgtacgaggcggacgatgctatcctgcacactccggggtgtgtcccttgcgtccgcgagggtaacggctcgaggtgttggtggcgataacccccacggtggccaccagggacggcaaactccccacagtgcagcttcgacgtcacatcgatctgcttgtcgggagcgctaccctttgttcggccctttacgtgggggacctgtgcggtctgtctttcttgtcggccaactgttcaccttctctcccaggcgccactggacaacgcaggactgcaattgttccatctatcccggccatataacgggtcaccgtatggcatgggacatgatgatgaactggtcccctacgcggcgctggtagtagctcagatgctccggatcccacaagccatcctggacatgatcgctggtgctcactggggagtcctggcgggcatagcgtatttctccatggtggggaactgggcgaaggtcctgtagtgctgctgctatttgccggcgtcgacgcgggaacccacgtcaccgggggcattgccgcccgtaccacgtctagaattgctggtctcttcaacccaggcgcccagcaggacatccagctggttaacaccaacggcagtggcacatcaacagaacggccttgaactgtaacgatagccttcacaccggctggatagcggggcttttctatcgctacaaattcaactcttcaggctgtcccgagaggttggccagctgccgacccctaccgattttgcccagggctggggccctattagttacgccaacggaagcggccccgaccaacgcccctactgctggcactatcccccaaagccttgcggcattgtgcccgcacagagcgtgtgtggcccggtgtattgcttcctcccagccccgtggtggtgggaacgaccgacaaggcgggcgcgcctacctacagatggggtgcaaacgatacggacgtcttcgtccttaacaacaccaggccaccactgggcaattggttcggttgacctggatgaactcaactggatacaccaaagtgtgcggggcgcccccctgcgtcatcggaggggtgggcaacaagaccttgcactgccccaccgattgtttccgcaagcatccggaagccacatactctcggtgcggctccgtccctggattacacccaggtgcctggtcgactatccgtataggctttggcattacccttgtaccatcaactacaccgtgttcaaagtcaggatgtacgtgggaggggtcgagcataggctagaggcgcctgcaactggacgcggggcgaacgttgcaatctggaagacagggacaggtccgagctcagcccgttgctgctgtccaccacacagtggcaagtccttccgtgttccttcacgaccctgccagccttgtccaccggcctctccacctccaccagaacattgtggacgtgcagtacttatacggggtggggtcaagcatcgcgtcctgggccatcaagtgggagtacgtcgttctcctattccttctgctcgcagacgcgcgcgtctgtcctgcttgtggatgatgttactcatatcccaagcggaggcggctttggagaacctcgtagtgctcaatgcagcatctttggccgggacacacggtcttgtgtccctcctcgtgttcttctgctttgcgtggtacctgaaggtaggtgggtgcccggagcggtctacgccctctacgggatgtggcctctcctcctgctcctattggcgttgccccagcgggcatatgcgttggacacggaggtggccgcgtcgtgtggcggcgctgtcttgtcgggttgatggcgctgactctgtcaccatattacaagcgctatgtcagctggtgcttatggtggcttcagtactttctgaccagagcagaagcgcaactgcacgtgtgggttccccctctcgacgtccgagggggggcgacgccgtcatcttactcatgtgtgctgtacgcccgactttggtgtttgacatcaccaagctgctgctggccgtcctcggacccctctggattctccaagccagtttacttaaagtgccctacttgtgcgcgttcaaggccttctccggatctgcgcgctagcgcggaagatggcggggggtcattacgtgcaaatggtcatcatcaagttgggggcgctcactggcacttatgtgtataaccatctcactcctcttcgggactggcgcacaacggcctgcgagatctggctgtggctgtagagccagtcgtcttctcccgaatggagaccaacctcatcacgtggggggcagacaccgccgcatgcggcgacatcatcaacggcttgcccgttccgcccgcaggggccgggagatactgctcggaccagccgacggaatggtctccaaggggtggaggttgctggcacccatcacggcgtacgcccagcagacaaggggcctcctagggtgtataatcaccagcctaaccggcgggacaaaaatcaggtggagggtgaggtccagattgtgtcaactgctgcccaaacctttctggcaacgtgcatcaatggagtatgctggaccgtctaccacggggccggaacgaggaccatcgcatccccaagggtccggttatccagatgtacaccaatgtagacaaagatcttgtgggttggcccgctcctcaaggttcccgttctttggcaccctgcacctgcggctcctcggacctttatctggtcacgaggcacgccgatgtcttcccgtgcgccggcggggtgatagcaggggcagcctgctttcgccccggcccatttcctacttgaaaggctcctcggggggtccgctattgtgccccgcggggcacgccgtgggcattttcagggcgcggtgtgcacccgtggagtggctaaggcagtggactttatccctgtagagaacctagagacaaccatgaggtccccggtgttcacggacaactcctctccaccagcagtaccccagagcttccaggtggcccacctgcatctcccacaggcagcggcaagagcaccaaggtcccagctgcatacgcagctcagggctataaggtgctagtgctcaacccctctgttgctgcaacactaggcttcggtgcttatatgtccaaggcccagggatcgaccctaacatcaggaccggggtgagaacaattaccactggcagccccatcacgtactccacctacggcaagttccttgccgacggcgggtgctcagggggtgcttatgacataataatctgtgacgagtgccacccacggatgccacgtccatcttaggcatcggcaccgtccttgaccaagcagagaccgcaggggcgaggcttgttgtgctcgccaccgctacccctccgggctccatcaccgtgccccatcctaacatgaggaggttgctctgtccaccaccggagagatccccttttatggcaaggctatccccctcgaagtaatcaagggggggaggcatctcatcttctgtcattcaaagaagaagtgtgacgagctcgctgcaaagctggttgcatgggcgtcaatgccgtggcctattaccgcggtcttgacgtgtctgtcatcccgaccagcggcgatgttgtcgtcgtggcaactgatgctctcatgaccggctataccggcgacttcgactcggtgatgactgcaacacgtgtgtcacccagacagtcgatttcagccttgaccccaccttcaccattgagacaaccacgcttccccaggatgctgtctcccgtacacaacggcggggcaggactggcagggggaagccaggcacctacggtttgtggcaccgggggagcgcccctctggcatgttcgactcgtctgtcctctgtgagtgctatgacgcgggctgtgcttggtatgagctcacgcccgccgagaccacagttaggctacgagcgtaatgaacaccccggggcttcccgtgtgccaggaccaccttgaattttgggagggcgtctttacgggccttacccatatagatgcccacttcctatcccagacaaagcagagtggggagaaccttccttacctggtagcgtacaagccaccgtgtgcgctagggctcaagcccctcccccatcgtgggaccagatgtggaagtgtttagtccgcctcaagcccaccctccatgggccaacacccctgctatacagattgggcgctgttcaaatgaagtcaccctgacacacccaatcacaaaatacatcatgacatgtatgtcggctga

SEQ ID NO: 230 - DNA, 4869 bp, Hepatitis C virus; identical to SEQ ID NO: 194

SEQ ID NO: 231 - DNA, 4869 bp, Hepatitis C virus; identical to SEQ ID NO: 194

SEQ ID NO: 232 - DNA, 4869 bp, Hepatitis C virus; identical to SEQ ID NO: 209

SEQ ID NO: 233 - DNA, 4869 bp, Hepatitis C virus; identical to SEQ ID NO: 194

SEQ ID NO: 234 - DNA, 4869 bp, Hepatitis C virus; identical to SEQ ID NO: 195

SEQ ID NO: 235 - DNA, 4869 bp, Hepatitis C virus
tcgcccacaggacgtcaagttcccgggtggcggtcagatcgttggtggagtttacttgttgccgcgcaggggccctagattgggtgtgcgcgcgacgaggaagacttccgagcggtcgcaacctcgagtagacgtcagcctatccccaaggcacgtcggcccgagggcaggacctgggctcagcccgggtacccctggcccctctatggcaatgagggctgcgggtgggcgggatggctcctgtctccccgtggtctcggcctaactggggccccacagacccccggcgtaggtcgcgtaatttgggtaaggtcatcgatacccttacatgcggcttcgccgacctcatggggtacataccgctcgtcggcgcccctcttgggggcgctgccaggccctggcgcatggcgtccgggttctggaagacggcgtgaactatgcaacagggaaccttcctggttgctctttctctatcttccttctggctttgctctcttgcctgactgtgcctgcttcagcctacaagtgcgcaactccacggggctttatcatgtcaccaatgattgccctaactcgagtattgtgtacgaggcggacgatgctatcctgcacactccggggtgtgtcccttgcgtccgcgagggtaacggctcgaggtgttggtggcgataacccccacggtggccaccagggacggcaaactccccacagtgcagcttcgacgtcacatcgatctgctcgtcgggagcgctaccctttgttcggccctttacgtgggggacctgtgcggtctgtctttcttgtcggccaactgttcaccttctctcccaggcgccactggacaacgcaggactgcaattgttccatctatcccggccatataacgggtcaccgtatggcatgggacatgatgatgaactggtcccctacgcggcgctggtagtagctcagatgctccggatcccacaagccatcctggacatgatcgctggtgctcactggggagtcctggcgggcatagcgtatttctccatggtggggaactgggcgaaggtcctgtagtgctgctgctatttgccggtgtcgacgcgggaacccacgtcaccgggggcattgccgcccgtaccacgtctagaattgctggtctcttcaacccaggcgcccagcaggacatccagctggttaacaccaacggcagtggcacatcaacagaacggccttgaactgtaacgatagccttcacaccggctggatagcggggcttttctatcgctacaaattcaactcttcaggctgtcccgagaggttggccagctgccgacccctaccgattttgcccagggctggggccctattagttacgccaacggaagcggccccgaccaacgcccctactgctggcactatcccccaaagccttgcggcattgtgcccgcacagagcgtgtgtggcccggtgtattgcttcctcccagccccgtggtggtgggaacgaccgacaaggcgggcgcgcctacctacagatggggtgcaaacgatacggacgtcttcgtccttaacaacaccaggccaccactgggcaattggttcggttgacctggatgaactcaactggatacaccaaagtgtgcggggcgcccccctgcgtcatcggaggggtgggcaacaagaccttgcactgccccaccgattgtttccgcaagcatccggaagccacatactctcggtgcggctccgtccctggattacacccaggtgtctggtcgactatccgtataggctttggcattacccttgtaccatcaactacaccgtgttcaaagtcaggatgtacgtgggaggggtcgagcataggctggaggcgcctgcaactggacgcggggcgaacgttgcaatctggaagacagggacaggtccgagctcagcccgttgctgctgtccaccacacagtggcaagtccttccgtgttccttcacgaccctgccagccttgtccaccggcctctccacctccaccagaacattgtggacgtgcagtacttatacggggtggggtcaagcatcgcgtcctgggccatcaagtgggagtacgtcgttctcctattccttctgctcgcagacgcgcgcgtctgtcctgcttgtggatgatgttactcatatcccaagcggaggcggctttggagaacctcgtagtgctcaatgcagcatctttggccgggacacacggtcttgtgtccctcctcgtgttcttctgctttgcgtggtacctgaaggtaggtgggtgcccggagcggtctacgccctctacgggatgtggcctctcctcctgctcctattggcgttgccccagcgggcatatgcgttggacacggaggtggccgcgtcgtgtggcggcgctgtcttgtcgggttgatggcgctgactctgtcaccatattacaagcgctatgtcagctggtgcttatggtggcttcagtactttctgaccagagcagaagcgcaactgcacgtgtgggttccccctctcgacgtccgagggggggcgacgccgtcatcttactcatgtgtgctgtacgcccggctttggtgtttgacatcaccaagctgctgctggccgtcctcggacccctctggattctccaagccagtttgcttaaagtgccctacttgtgcgcgttcaaggccttctccggatctgcgcgctagcgcggaagatggcggggggtcattacgtgcaaatggtcatcatcaagttgggggcgctcactggcacttatgtgtataaccatctcactcctcttcgggactggcgcacaacggcctgcgagatctggctgtggctgtagagccagtcgtcttctcccgaatggagaccaacctcatcacgtggggggcagacaccgccgcatgcggcgacatcatcaacggcttgcccgttccgcccgcaggggccgggagatactgctcggaccagccgacggaatggtctccaaggggtggaggttgctggcacccatcacggcatacgcccagcagacaaggggcctcctagggtgtataatcaccagcctaaccggcgggacaaaaatcaggtggagggtgaggtccagattgtgtcaactgctgcccaaacctttctggcaacgtgcatcaatggagtatgctggaccgtctaccacggggccggaacgaggaccatcgcatccccaagggtcctgttatccagatgtacaccaatgtagataaagatctcgtgggttggcccgctcctcaaggttcccgttctttggcaccctgcacctgcggctcctcggacctttatctggtcacgaggcacgccgatgtcttcccgtgcgccggcggggtgatagcaggggcagcctgctttcgccccggcccatttcctacttgaaaggctcctcggggggtccgctgttgtgccccgcggggcacgccgtgggcattttcagggcgcggtgtgcacccgtggagtggctaaggcagtggactttatccctgtagagaacctagagacaaccatgaggtccccggtgttcacggacaactcctctccaccagcagtaccccagagcttccaggtggcccacctgcatctcccacaggcagcggcaagagcaccaaggtcccagctgcatacgcagctcagggctataaggtgctagtgctcaacccctctgttgctgcaacactaggcttcggtgcttatatgtccaaggcccagggatcgaccctaacatcaggaccggggtgagaacaattaccactggcagccccatcacgtactccacctacggcaagttccttgccgacggcgggtgctcagggggtgcttatgacataataatctgtgacgagtgccacccacggatgccacgtccatcttaggcatcggcaccgtccttgaccaagcagagaccgcaggggcgaggcttgttgtgctcgccaccgctacccctccgggctccatcactgtgccccatcctaacatgaggaggttgctctgtccaccaccggagagatccccttttatggcaaggctatccccctcgaagtaatcaagggggggaggcatctcatcttctgtcattcaaagaagaagtgtgacgagctcgctgcaaagctggttgcatgggcgtcaatgccgtggcctattaccgcggtcttgacgtgtctgtcatcccgaccagcggcgatgttgtcgtcgtggcaactgatgctctcatgaccggctataccggcgacttcgactcggtgatgactgcaacacgtgtgtcacccagacagtcgatttcagccttgaccccaccttcaccattgagacaaccacgcttccccaggatgctgtctcccgtacacaacggcggggcaggactggcagggggaagccaggcacctacggtttgtggcaccgggggagcgcccctctggcatgttcgactcgtctgtcctctgtgagtgctatgacgcgggctgtgcttggtatgagctcacgcccgccgagaccacagttaggctacgagcgtaatgaacaccccggggcttcccgtgtgccaggaccaccttgaattttgggagggcgtctttacgggccttacccatatagatgcccacttcctatcccagacaaagcagagtggggagaaccttccttacctggtagcgtacaagccaccgtgtgcgctagggctcaagcccctcccccgtcgtgggaccagatgtggaagtgtttagtccgcctcaagcccaccctccatgggccaacacccctgctatacagattgggcgctgttcaaatgaagtcaccctgacacacccaatcacaaaatacatcatgacatgtatgtcggctga

SEQ ID NO: 236 - DNA, 4869 bp, Hepatitis C virus; identical to SEQ ID NO: 194

SEQ ID NO: 237 - DNA, 4869 bp, Hepatitis C virus; identical to SEQ ID NO: 195

SEQ ID NO: 238 - DNA, 4869 bp, Hepatitis C virus
tcgcccacaggacgtcaagttcccgggtggcggtcagatcgttggtggagtttacttgttgccgcgcaggggccctagattgggtgtgcgcgcgacgaggaagacttccgagcggtcgcaacctcgagtagacgtcagcctatccccaaggcacgtcggcccgagggcaggacctgggctcagcccgggtacccctggcccctctatggcaatgagggctgcgggtgggcgggatggctcctgtctccccgtggtctcggcctaactggggccccacagacccccggcgtaggtcgcgtaatttgggtaaggtcatcgatacccttacatgcggcttcgccgacctcatggggtacataccgctcgtcggcgcccctcttgggggcgctgccaggccctggcgcatggcgtccgggttctggaagacggcgtgaactatgcaacagggaaccttcctggttgctctttctctatcttccttctggctttgctctcttgcctgactgtgcctgcttcagcctacaagtgcgcaactccacggggctttatcatgtcaccaatgattgccctaactcgagtattgtgtacgaggcggacgatgctatcctgcacactccggggtgtgtcccttgcgtccgcgagggtaacggctcgaggtgttggtggcgataacccccacggtggccaccagggacggcaaactccccacagtgcagcttcgacgtcacatcgatctgctcgtcgggagcgctaccctttgttcggccctttacgtgggggacctgtgcggtctgtctttcttgtcggccaactgttcaccttctctcccaggcgccactggacaacgcaggactgcaattgttccatctatcccggccatataacgggtcaccgtatggcatgggacatgatgatgaactggtcccctacgcggcgctggtagtagctcagatgctccggatcccacaagccatcctggacatgatcgctggtgctcactggggagtcctggcgggcatagcgtatttctccatggtggggaactgggcgaaggtcctgtagtgctgctgctatttgccggcgtcgacgcgggaacccacgtcaccgggggcattgccgcccgtaccacgtctagaattgctggtctcttcaacccaggcgcccagcaggacatccagctggttaacaccaacggcagtggcacatcaacagaacggccttgaactgtaacgatagccttcacaccggctggatagcggggcttttctatcgctacaaattcaactcttcaggctgtcccgagaggttggccagctgccgacccctaccgattttgcccagggctggggccctattagttacgccaacggaagcggccccgaccaacgcccctactgctggcactatcccccaaagccttgcggcattgtgcccgcacagagcgtgtgtggcccggtgtattgcttcctcccagccccgtggtggtgggaacgaccgacaaggcgggcgcgcctacctacagatggggtgcaaacgatacggacgtcttcgtccttaacaacaccaggccaccactgggcaattggttcggttgacctggatgaactcaactggatacaccaaagtgtgcggggcgcccccctgcgtcatcggaggggtgggcaacaagaccttgcactgccccaccgattgtttccgcaagcatccggaagccacatactctcggtgcggctccgtccctggattacacccaggtgtctggtcgactatccgtataggctttggcattacccttgtaccatcaactacaccgtgttcaaagtcaggatgtacgtgggaggggtcgagcataggctggaggcgcctgcaactggacgcggggcgaacgttgcaatctggaagacagggacaggtccgagctcagcccgttgctgctgtccaccacacagtggcaagtccttccgtgttccttcacgaccctgccagccttgtccaccggcctctccacctccaccagaacattgtggacgtgcagtacttatacggggtggggtcaagcatcgcgtcctgggccatcaagtgggagtacgtcgttctcctattccttctgctcgcagacgcgcgcgtctgtcctgcttgtggatgatgttactcatatcccaagcggaggcggctctggagaacctcgtagtgctcaatgcagcatctttggccgggacacacggtcttgtgtccctcctcgtgttcttctgctttgcgtggtacctgaaggtaggtgggtgcccggagcggtctacgccctctacgggatgtggcctctcctcctgctcctattggcgttgccccagcgggcatatgcgttggacacggaggtggccgcgtcgtgtggcggcgctgtcttgtcgggttgatggcgctgactctgtcaccatattacaagcgctatgtcagctggtgcttatggtggcttcagtactttctgaccagagcagaagcgcaactgcacgtgtgggttccccctctcgacgtccgagggggggcgacgccgtcatcttactcatgtgtgctgtacgcccggctttggtgtttgacatcaccaagctgctgctggccgtcctcggacccctctggattctccaagccagtttgcttaaagtgccctacttgtgcgcgttcaaggccttctccggatctgcgcgctagcgcggaagatggcggggggtcattacgtgcaaatggtcatcatcaagttgggggcgctcactggcacttatgtgtataaccatctcactcctcttcgggactggcgcacaacggcctgcgagatctggctgtggctgtagagccagtcgtcttctcccgaatggagaccaacctcatcacgtggggggcagacaccgccgcatgcggcgacatcatcaacggcttgcccgttccgcccgcaggggccgggagatactgctcggaccagccgacggaatggtctccaaggggtggaggttgctggcacccatcacggcatacgcccagcagacaaggggcctcctagggtgtataatcaccagcctaaccggcgggacaaaaatcaggtggagggtgaggtccagattgtgtcaactgctgcccaaacctttctggcaacgtgcatcaatggagtatgctggaccgtctaccacggggccggaacgaggaccatcgcatccccaagggtcctgttatccagatgtacaccaatgtagataaagatctcgtgggttggcccgctcctcaaggttcccgttctttggcaccctgcacctgcggctcctcggacctttatctggtcacgaggcacgccgatgtcttcccgtgcgccggcggggtgatagcaggggcagcctgctttcgccccggcccatttcctacttgaaaggctcctcggggggtccgctgttgtgccccgcggggcacgccgtgggcattttcagggcgcggtgtgcacccgtggagtggctaaggcagtggactttatccctgtagagaacctagagacaaccatgaggtccccggtgttcacggacaactcctctccaccagcagtaccccagagcttccaggtggcccacctgcatctcccacaggcagcggcaagagcaccaaggtcccagctgcatacgcagctcagggctataaggtgctagtgctcaacccctctgttgctgcaacactaggcttcggtgcttatatgtccaaggcccagggatcgaccctaacatcaggaccggggtgagaacaattaccactggcagccccatcacgtactccacctacggcaagttccttgccgacggcgggtgctcagggggtgcttatgacataataatctgtgacgagtgccacccacggatgccacgtccatcttaggcatcggcaccgtccttgaccaagcagagaccgcaggggcgaggcttgttgtgctcgccaccgctacccctccgggctccatcactgtgccccatcctaacatgaggaggttgctctgtccaccaccggagagatccccttttatggcaaggctatccccctcgaagtaatcaagggggggaggcatctcatcttctgtcattcaaagaagaagtgtgacgagctcgctgcaaagctggttgcatgggcgtcaatgccgtggcctattaccgcggtcttgacgtgtctgtcatcccgaccagcggcgatgttgtcgtcgtggcaactgatgctctcatgaccggctataccggcgacttcgactcggtgatgactgcaacacgtgtgtcacccagacagtcgatttcagccttgaccccaccttcaccattgagacaaccacgcttccccaggatgctgtctcccgtacacaacggcggggcaggactggcagggggaagccaggcacctacggtttgtggcaccgggggagcgcccctctggcatgttcgactcgtctgtcctctgtgagtgctatgacgcgggctgtgcttggtatgagctcacgcccgccgagaccacagttaggctacgagcgtaatgaacaccccggggcttcccgtgtgccaggaccaccttgaattttgggagggcgtctttacgggccttacccatatagatgcccacttcctatcccagacaaagcagagtggggagaaccttccttacctggtagcgtacaagccaccgtgtgcgctagggctcaagcccctcccccgtcgtgggaccagatgtggaagtgtttagtccgcctcaagcccaccctccatgggccaacacccctgctatacagattgggcgctgttcaaatgaagtcaccctgacacacccaatcacaaaatacatcatgacatgtatgtcggctga

SEQ ID NO: 239 - DNA, 4869 bp, Hepatitis C virus
tcgcccacaggacgtcaagttcccgggtggcggtcagatcgttggtggagtttacttgttgccgcgcaggggccctagattgggtgtgcgcgcgacgaggaagacttccgagcggtcgcaacctcgagcagacgtcagcctatccccaaggcacgtcggcccgagggcaggacctgggctcagcccgggtacccctggcccctctatggcaatgagggctgtgggtgggcgggatggctcctgtctccccgtggtctcggcctagctggggcccctcagacccccggcgtaggtcgcgtaatttgggtaaagtcatcgatacccttacatgcggcttcgccgacctcatggggtacataccgctcgtcggcgctcctcttgggggcgctgccaggccctggcgcatggcgtccgggttctggaagacggcgtgaactatgcaacagggaaccttcctggttgctctttctctatcttcctcctggctttgctctcttgcctgactgtgcctgcttcagcctacaagtgcgcaactccacggggctttatcatgtcaccaatgattgccctaactcgagtattgtgtacgaggcggccgatgctatcctgcacactccggggtgtgtcccttgcgtctacgagggtaacgcctcgaggtgttggtggcgataacccccacggtggccaccagggatggcaaactccccacagtccagcttcgacgtcacatcgatctgcttgtcgggagcgctaccctttgttcggccctttacgtgggggacctgtgcggtctgtctttcttgtcggccaactattcaccttctctcccaggctccactggacaacgcaggactgcaattgttccatctaccccggccatataacgggtcaccgtatggcatgggacatgatgatgaactggtcccctacgcggcgctggtagtagctcagatgctccggatcccgcaagccatcttggacatgatcgctggtgctcactggggagtcctagcgggcatagcgtatttctccatggtggggaactgggcgaaggtcctgtagtgctgctgctatttgccggcgtcgacgcggaaacccacgtcaccgggggagctgccggccgtaccatggctggatttactggtctctttacacaaggcgccaagcagagcatccagttggttaacaccaacggcagtggcacatcaacagaacggctttgaactgcaacgatagccttcagaccggctggatagcggggcttctctatcacaacaaattcaactcttcaggctgtcccgagaggttggccagctgccgacccctaccgattttgcccagggctggggccctatcagttacgccaacggaagcgggcccgaccaacgcccctactgctggcactaccccccaaagccttgcggcattgtgcccgcacagagcgtatgtggcccggtatattgtttcctcctagccccgtggtggtgggaacgaccgacaggtcgggcgcgcctacctacggatggggtgcaaacgatacggacgtcttcgtccttaacaacaccaggccaccactgggcaattggttcggttgacctggatgaactcaactggatacaccaaagtgtgcggggcgcccccctgtgtcatcagaggggtgggcaataacaccttgcactgccccaccgattgtttccgcaagcatccggaaaccacatactctcggtgcggctccgtccctggattacacccaggtgcctggtcaactacccgtataggctttggcattacccttgtaccatcaactacaccgtgttcaaggtcaggatgtacgtgggaggggtcgagcataggctagaggcgcctgcaactggacgcggggcgaacgttgcagtctggaagacagggacaggtccgagctcagcccgttgctgctgtccaccacacagtggcaggtccttccctgttccttcacgaccctgccagccttgtccaccggcctctccacctccaccagaacattgtggacgtgcagtacttatacggggtggggtcaagtatcgcgtcctgggccatcaagtgggagtacgtcgttctcctattccttctgcttgcagacgcgcgcgtctgtcctgcttgtggatgatgttactcatatcccaagcggaggcggccttggagaacctcgtagtgctcaatgcagcatctttggccgggacgcatggtcttgtgtccttcctcgtgttcttctgctttgcgtggtacttgaaggtaggtgggtgcccggagcgacctacgccctctacgggatgtggcctctcctcctgctcctgttggcgttgccccagcgggcatacgcgttggacacggaggtggccgcgtcgtgtggcggcgctgtcttgtcgggttgatggcgctgactctgtcaccacattacaagcgatatgtcagctggtgcttgtggtggcttcagtactttctgaccagagcagaagcgcaactgcacgtgtgggttccccccctcgacgtccgagggggggcgacgccgtcatcttactcatgtgtgctgtacgcccgactttggtgtttgacatcaccaagctgctgctggccgtcttcgggcccctttggattctccaagccagtttgcttaaagtaccctacttgtgcgcgttcaaggccttctccggatctgcgcgctagcgcggaagatggcggggggtcattacgtgcaaatggtcatcatcaaactaggggcgctcactggcacctatgtttataaccacctcactcctcttcgggactggcgcacaacggcctgcgagatctggctgtggctgtagagccagtcgtcttctcccgaatggagaccaacctcatcacgtggggggcagacaccgccgcgtgcggtgacatcatcaacggcttgcccgttccgcccgtaggggccgggagatactgctcggaccagccgacggaatggtctccaaggggtggaggttgctggcacccatcacggcatacgcccagcagacaaggggcctcctagggtgtataatcaccagcctaaccggcgggacaaaaaccaggtggagggtgaggtccagattgtgtcaactgctgcccaaactttcctggcaacgtgcatcaacggagtatgctggaccgtctaccacggggccgggacgaggaccatcgcatccccaagggtcctgtcatccagatgtacaccaatgtagacaaagatcttgtgggctggcccgctccccaaggctcccgttcattgacaccctgcacctgcggctcctcggacctttatctggtcacgaggcacgccgatgtcttcccgtgcgccggcggggtgatagcaggggcagcctgctttcgccccggcctatttcctacttgaaaggctcctcggggggtccgctgttgtgccccgcggggcatgctgtgggcatattcagggcgcagtgtgcacccgtggagtggctaaggcggtggactttatccctgtagagaacctagagacaaccatgaggtccccggtgttcacggacaactcctctccaccggcagtaccccagagcttccaggtggcccacctgcatctcccacaggcagcggcaagagcaccaaggtcccggctgcatacgcagctcagggctataaggtgctagtgctcaacccctctgttgctgcaacactgggcttcggtgtttatatgtccaaggcccagggatcgatcctaacatcaggaccggggtgagaacaattaccactggcagccccatcacgtactccacctacggcaagttccttgccgacggcgggtgctcagggggtgcttatgacataataatctgtgacgagtgccacccacggatgccacatctatcttaggcatcggcaccgtccttgaccaagcagagaccgcgggggcgaggcttgttgtgctcgccaccgctacccctccgggctccgtcaccgtgccccatcctaacatgaggaggttgctctgtccaccaccggagagatccctttttatggcaaggctatccccctcgaagtaatcaagggggggaggcatctcatcttctgtcattcaaagaagaagtgtgacgagctcgccgcaaagctggttgcatgggcgtcaatgccgtggcctattaccgcggccttgacgtgtctgtcatcccgaccagcggcgatgttgtcgtcgtggcaactgatgctctcatgaccggctataccggcgacttcgactcggtgatgactgcaatacgtgtgtcacccagacagttgatttcagccttgaccccaccttcaccattgagacaaccacgcttccccaggatgctgtctcccgtacacaacgtcggggcaggactggcagggggaagccaggcacctacgatttgtggcaccgggggagcgcccctccggcatgttcgactcgtctgtcctctgtgagtgctatgacgcgggctgtgcttggtatgagctcacgcccgccgagactacagttaggctacgagcgtaatgaacaccccggggcttcccgtgtgccaggaccaccttgaattttgggagggcgtctttacgggccttactcatatagatgcccacttcctatcccagacaaagcagagtggggagaaccttccttacctggtagcgtacaagccaccgtgtgcgctagggctcaagcccctcccccatcgtgggaccagatgtggaagtgcttggtccgcctcaagcccaccctccatgggccaacacccctgctatacagattgggcgctgttcaaatgaagtcaccctgacacacccaatcacaaaatacatcatgacatgtatgtcggctga

SEQ ID NO: 240 - DNA, 4869 bp, Hepatitis C virus
tcgcccacaggacgtcaagttcccgggtggcggtcagatcgttggtggagtttacttgttgccgcgcaggggccctagattgggtgtgcgcgcgacgaggaagacttccgagcggtcgcaacctcgagtagacgtcagcctatccccaaggcacgtcggcccgagggcaggacctgggctcagcccgggtacccctggcccctctatggcaatgagggctgcgggtgggcgggatggctcctgtctccccgtggtctcggcctaactggggccccacagacccccggcgtaggtcgcgtaatttgggtaaggtcatcgatacccttacatgcggcttcgccgacctcatggggtacataccgctcgtcggcgcccctcttgggggcgctgccaggccctggcgcatggcgtccgggttctggaagacggcgtgaactatgcaacagggaaccttcctggttgctctttctctatcttccttctggctttgctctcttgcctgactgtgcctgcttcagcctacaagtgcgcaactccacggggctttatcatgtcaccaatgattgccctaactcgagtattgtgtacgaggcggacgatgctatcctgcacactccggggtgtgtcccttgcgtccgcgagggtaacggctcgaggtgttggtggcgataacccccacggtggccaccagggacggcaaactccccacagtgcagcttcgacgtcacatcgatctgctcgtcgggagcgctaccctttgttcggccctttacgtgggggacctgtgcggtctgtctttcttgtcggccaactgttcaccttctctcccaggcgccactggacaacgcaggactgcaattgttccatctatcccggccatataacgggtcaccgtatggcatgggacatgatgatgaactggtcccctacgcggcgctggtagtagctcagatgctccggatcccacaagccatcctggacatgatcgctggtgctcactggggagtcctggcgggcatagcgtatttctccatggtggggaactgggcgaaggtcctgtagtgctgctgctatttgccggcgtcgacgcgggaacccacgtcaccgggggcattgccgcccgtaccacgtctagaattgctggtctcttcaacccaggcgcccagcaggacatccagctggttaacaccaacggcagtggcacatcaacagaacggccttgaactgtaacgatagccttcacaccggctggatagcggggcttttctatcgctacaaattcaactcttcaggctgtcccgagaggttggccagctgccgacccctaccgattttgcccagggctggggccctattagttacgccaacggaagcggccccgaccaacgcccctactgctggcactatcccccaaagccttgcggcattgtgcccgcacagagcgtgtgtggcccggtgtattgcttcctcccagccccgtggtggtgggaacgaccgacaaggcgggcgcgcctacctacagatggggtgcaaacgatacggacgtcttcgtccttaacaacaccaggccaccactgggcaattggttcggttgacctggatgaactcaactggatacaccaaagtgtgcggggcgcccccctgcgtcatcggaggggtgggcaacaagaccttgcactgccccaccgattgtttccgcaagcatccggaagccacatactctcggtgcggctccgtccctggattacacccaggtgtctggtcgactatccgtataggctttggcattacccttgtaccatcaactacaccgtgttcaaagtcaggatgtacgtgggaggggtcgagcataggctggaggcgcctgcaactggacgcggggcgaacgttgcaatctggaagacagggacaggtccgagctcagcccgttgctgctgtccaccacacagtggcaagtccttccgtgttccttcacgaccctgccagccttgtccaccggcctctccacctccaccagaacattgtggacgtgcagtacttatacggggtggggtcaagcatcgcgtcctgggccatcaagtgggagtacgtcgttctcctattccttctgctcgcagacgcgcgcgtctgtcctgcttgtggatgatgttactcatatcccaagcggaggcggctttggagaacctcgtagtgctcaatgcagcatctttggccgggacacacggtcttgtgtccctcctcgtgttcttctgctttgcgtggtacctgaaggtaggtgggtgcccggagcggtctacgccctctacgggatgtggcctctcctcctgctcctattggcgttgccccagcgggcatatgcgttggacacggaggtggccgcgtcgtgtggcggcgctgtcttgtcgggttgatggcgctgactctgtcaccatattacaagcgctatgtcagctggtgcttatggtggcttcagtactttctgaccagagcagaagcgcaactgcacgtgtgggttccccctctcgacgtccgagggggggcgacgccgtcatcttactcatgtgtgctgtacgcccggctttggtgtttgacatcaccaagctgctgctggccgtcctcggacccctctggattctccaagccagtttgcttaaagtgccctacttgtgcgcgttcaaggccttctccggatctgcgcgctagcgcggaagatggcggggggtcattacgtgcaaatggtcatcatcaagttgggggcgctcactggcacttatgtgtataaccatctcactccccttcgggactggcgcacaacggcctgcgagatctggctgtggctgtagagccagtcgtcttctcccgaatggagaccaacctcatcacgtggggggcagacaccgccgcatgcggcgacatcatcaacggcttgcccgttccgcccgcaggggccgggagatactgctcggaccagccgacggaatggtctccaaggggtggaggttgctggcacccatcacggcatacgcccagcagacaaggggcctcctagggtgtataatcaccagcctaaccggcgggacaaaaatcaggtggagggtgaggtccagattgtgtcaactgctgcccaaacctttctggcaacgtgcatcaatggagtatgctggaccgtctaccacggggccggaacgaggaccatcgcatccccaagggtcctgttatccagatgtacaccaatgtagataaagatctcgtgggttggcccgctcctcaaggttcccgttctttggcaccctgcacctgcggctcctcggacctttatctggtcacgaggcacgccgatgtcttcccgtgcgccggcggggtgatagcaggggcagcctgctttcgccccggcccatttcctacttgaaaggctcctcggggggtccgctgttgtgccccgcggggcacgccgtgggcattttcagggcgcggtgtgcacccgtggagtggctaaggcagtggactttatccctgtagagaacctagagacaaccatgaggtccccggtgttcacggacaactcctctccaccagcagtaccccagagcttccaggtggcccacctgcatctcccacaggcagcggcaagagcaccaaggtcccagctgcatacgcagctcagggctataaggtgctagtgctcaacccctctgttgctgcaacactaggcttcggtgcttatatgtccaaggcccagggatcgaccctaacatcaggaccggggtgagaacaattaccactggcagccccatcacgtactccacctacggcaagttccttgccgacggcgggtgctcagggggtgcttatgacataataatctgtgacgagtgccacccacggatgccacgtccatcttaggcatcggcaccgtccttgaccaagcagagaccgcaggggcgaggcttgttgtgctcgccaccgctacccctccgggctccatcactgtgccccatcctaacatgaggaggttgctctgtccaccaccggagagatccccttttatggcaaggctatccccctcgaagtaatcaagggggggaggcatctcatcttctgtcattcaaagaagaagtgtgacgagctcgctgcaaagctggttgcatgggcgtcaatgccgtggcctattaccgcggtcttgacgtgtctgtcatcccgaccagcggcgatgttgtcgtcgtggcaactgatgctctcatgaccggctataccggcgacttcgactcggtgatgactgcaacacgtgtgtcacccagacagtcgatttcagccttgaccccaccttcaccattgagacaaccacgcttccccaggatgctgtctcccgtacacaacggcggggcaggactggcagggggaagccaggcacctacggtttgtggcaccgggggagcgcccctctggcatgttcgactcgtctgtcctctgtgagtgctatgacgcgggctgtgcttggtatgagctcacgcccgccgagaccacagttaggctacgagcgtaatgaacaccccggggcttcccgtgtgccaggaccaccttgaattttgggagggcgtctttacgggccttacccatatagatgcccacttcctatcccagacaaagcagagtggggagaaccttccttacctggtagcgtacaagccaccgtgtgcgctagggctcaagcccctcccccgtcgtgggaccagatgtggaagtgtttagtccgcctcaagcccaccctccatgggccaacacccctgctatacagattgggcgctgttcaaatgaagtcaccctgacacacccaatcacaaaatacatcatgacatgtatgtcggctga

SEQ ID NO: 241 - DNA, 4869 bp, Hepatitis C virus
tcgcccacaggacgtcaagttcccgggtggcggtcagatcgttggtggagtttacttgttgccgcgcaggggccctagattgggtgtgcgcgcgacgaggaagacttccgagcggtcgcaacctcgagtagacgtcagcctatccccaaggcacgtcggcccgagggcaggacctgggctcagcccgggtacccctggcccctctatggcaatgagggctgcgggtgggcgggatggctcctgtctccccgtggtctcggcctaactggggccccacagacccccggcgtaggtcgcgtaatttgggtaaggtcatcgatacccttacatgcggcttcgccgacctcatggggtacataccgctcgtcggcgcccctcttgggggcgctgccaggccctggcgcatggcgtccgggttctggaagacggcgtgaactatgcaacagggaaccttcctggttgctctttctctatcttccttctggctttgctctcttgcctgactgtgcctgcttcagcctacaagtgcgcaactccacggggctttatcatgtcaccaatgattgccctaactcgagtattgtgtacgaggcggacgatgctatcctgcacactccggggtgtgtcccttgcgtccgcgagggtaacggctcgaggtgttggtggcgataacccccacggtggccaccagggacggcaaactccccacagtgcagcttcgacgtcacatcgatctgctcgtcgggagcgctaccctttgttcggccctttacgtgggggacctgtgcggtctgtctttcttgtcggccaactgttcaccttctctcccaggcgccactggacaacgcaggactgcaattgttccatctatcccggccatataacgggtcaccgtatggcatgggacatgatgatgaactggtcccctacgcggcgctggtagtagctcagatgctccggatcccacaagccatcctggacatgatcgctggtgctcactggggagtcctggcgggcatagcgtatttctccatggtggggaactgggcgaaggtcctgtagtgctgctgctatttgccggcgtcgacgcgggaacccacgtcaccgggggcattgccgcccgtaccacgtctagaattgctggtctcttcaacccaggcgcccagcaggacatccagctggttaacaccaacggcagtggcacatcaacagaacggccttgaactgtaacgatagccttcacaccggctggatagcggggcttttctatcgctacaaattcaactcttcaggctgtcccgagaggttggccagctgccgacccctaccgattttgcccagggctggggccctattagttacgccaacggaagcggccccgaccaacgcccctactgctggcactatcccccaaagccttgcggcattgtgcccgcacagagcgtgtgtggcccggtgtattgcttcctcccagccccgtggtggtgggaacgaccgacaaggcgggcgcgcctacctacagatggggtgcaaacgatacggacgtcttcgtccttaacaacaccaggccaccactgggcaattggttcggttgacctggatgaactcaactggatacaccaaagtgtgcggggcgcccccctgcgtcatcggaggggtgggcaacaagaccttgcactgccccaccgattgtttccgcaagcatccggaagccacatactctcggtgcggctccgtccctggattacacccaggtgtctggtcgactatccgtataggctttggcattacccttgtaccatcaactacaccgtgttcaaagtcaggatgtacgtgggaggggtcgagcataggctggaggcgcctgcaactggacgcggggcgaacgttgcaatctggaagacagggacaggtccgagctcagcccgttgctgctgtccaccacacagtggcaagtccttccgtgttccttcacgaccctgccagccttgtccaccggcctctccacctccaccagaacattgtggacgtgcagtacttatacggggtggggtcaagcatcgcgtcctgggccatcaagtgggagtacgtcgttctcctattccttctgctcgcagacgcgcgcgtctgtcctgcttgtggatgatgttactcatatcccaagcggaggcggctttggagaacctcgtagtgctcaatgcagcatctttggccgggacacacggtcttgtgtccctcctcgtgttcttctgctttgcgtggtacctgaaggtaggtgggtgcccggagcggtctacgccctctacgggatgtggcctctcctcctgctcctattggcgttgccccagcgggcatatgcgttggacacggaggtggccgcgtcgtgtggcggcgctgtcttgtcgggttgatggcgctgactctgtcaccatattacaagcgctatgtcagctggtgcttatggtggcttcagtactttctgaccagagcagaagcgcaactgcacgtgtgggttccccctctcgacgtccgagggggggcgacgccgtcatcttactcatgtgtgctgtacgcccggctttggtgtttgacatcaccaagctgctgctggccgtcctcggacccctctggattctccaagccagtttgcttaaagtgccctacttgtgcgcgttcaaggccttctccggatctgcgcgctagcgcggaagatggcggggggtcattacgtgcaaatggtcatcatcaagttgggggcgctcactggcacttacgtgtataaccatctcactcctcttcgggactggcgcacaacggcctgcgagatctggctgtggctgtagagccagtcgtcttctcccgaatggagaccaacctcatcacgtggggggcagacaccgccgcatgcggcgacatcatcaacggcttgcccgttccgcccgcaggggccgggagatactgctcggaccagccgacggaatggtctccaaggggtggaggttgctggcacccatcacggcatacgcccagcagacaaggggcctcctagggtgtataatcaccagcctaaccggcgggacaaaaatcaggtggagggtgaggtccagattgtgtcaactgctgcccaaacctttctggcaacgtgcatcaatggagtatgctggaccgtctaccacggggccggaacgaggaccatcgcatccccaagggtcctgttatccagatgtacaccaatgtagataaagatctcgtgggttggcccgctcctcaaggttcccgttctttggcaccctgcacctgcggctcctcggacctttatctggtcacgaggcacgccgatgtcttcccgtgcgccggcggggtgatagcaggggcagcctgctttcgccccggcccatttcctacttgaaaggctcctcggggggtccgctgttgtgccccgcggggcacgccgtgggcattttcagggcgcggtgtgcacccgtggagtggctaaggcagtggactttatccctgtagagaacctagagacaaccatgaggtccccggtgttcacggacaactcctctccaccagcagtaccccagagcttccaggtggcccacctgcatctcccacaggcagcggcaagagcaccaaggtcccagctgcatacgcagctcagggctataaggtgctagtgctcaacccctctgttgctgcaacactaggcttcggtgcttatatgtccaaggcccagggatcgaccctaacatcaggaccggggtgagaacaattaccactggcagccccatcacgtactccacctacggcaagttccttgccgacggcgggtgctcagggggtgcttatgacataataatctgtgacgagtgccacccacggatgccacgtccatcttaggcatcggcaccgtccttgaccaagcagagaccgcaggggcgaggcttgttgtgctcgccaccgctacccctccgggctccatcactgtgccccatcctaacatgaggaggttgctctgtccaccaccggagagatccccttttatggcaaggctatccccctcgaagtaatcaagggggggaggcatctcatcttctgtcattcaaagaagaagtgtgacgagctcgctgcaaagctggttgcatgggcgtcaatgccgtggcctattaccgcggtcttgacgtgtctgtcatcccgaccagcggcgatgttgtcgtcgtggcaactgatgctctcatgaccggctataccggcgacttcgactcggtgatgactgcaacacgtgtgtcacccagacagtcgatttcagccttgaccccaccttcaccattgagacaaccacgcttccccaggatgctgtctcccgtacacaacggcggggcaggactggcagggggaagccaggcacctacggtttgtggcaccgggggagcgcccctctggcatgttcgactcgtctgtcctctgtgagtgctatgacgcgggctgtgcttggtatgagctcacgcccgccgagaccacagttaggctacgagcgtaatgaacaccccggggcttcccgtgtgccaggaccaccttgaattttgggagggcgtctttacgggccttacccatatagatgcccacttcctatcccagacaaagcagagtggggagaaccttccttacctggtagcgtacaagccaccgtgtgcgctagggctcaagcccctcccccgtcgtgggaccagatgtggaagtgtttagtccgcctcaagcccaccctccatgggccaacacccctgctatacagattgggcgctgttcaaatgaagtcaccctgacacacccaatcacaaaatacatcatgacatgtatgtcggctga

SEQ ID NO: 242 - DNA, 4869 bp, Hepatitis C virus; identical to SEQ ID NO: 194

SEQ ID NO: 243 - DNA, 4869 bp, Hepatitis C virus; identical to SEQ ID NO: 224

SEQ ID NO: 244 - DNA, 4869 bp, Hepatitis C virus
tcgcccacaggacgtcaagttcccgggtggcggtcagatcgttggtggagtttacttgttgccgcgcaggggccctagattgggtgtgcgcgcgacgaggaagacttccgagcggtcgcaacctcgagtagacgtcagcctatccccaaggcacgtcggcccgagggcaggacctgggctcagcccgggtacccctggcccctctatggcaatgagggctgcgggtgggcgggatggctcctgtctccccgtggtctcggcctaactggggccccacagacccccggcgtaggtcgcgtaatttgggtaaggtcatcgatacccttacatgcggcttcgccgacctcatggggtacataccgctcgtcggcgcccctcttgggggcgctgccaggccctggcgcatggcgtccgggttctggaagacggcgtgaactatgcaacagggaaccttcctggttgctctttctctatcttccttctggctttgctctcttgcctgactgtgcctgcttcagcctacaagtgcgcaactccacggggctttatcatgtcaccaatgattgccctaactcgagtattgtgtacgaggcggacgatgctatcccgcacactccggggtgtgtcccttgcgtccgcgagggtaacggctcgaggtgttggtggcgataacccccacggtggccaccagggacggcaaactccccacagtgcagcttcgacgtcacatcgatctgctcgtcgggagcgctaccctttgttcggccctttacgtgggggacctgtgcggtctgtctttcttgtcggccaactgttcaccttctctcccaggcgccactggacaacgcaggactgcaattgttccatctatcccggccatataacgggtcaccgtatggcatgggacatgatgatgaactggtcccctacgcggcgctggtagtagctcagatgctccggatcccacaagccatcctggacatgatcgctggtgctcactggggagtcctggcgggcatagcgtatttctccatggtggggaactgggcgaaggtcctgtagtgctgctgctatttgccggcgtcgacgcgggaacccacgtcaccgggggcattgccgcccgtaccacgtctagaattgctggtctcttcaacccaggcgcccagcaggacatccagctggttaacaccaacggcagtggcacatcaacagaacggccttgaactgtaacgatagccttcacaccggctggatagcggggcttttctatcgctacaaattcaactcttcaggctgtcccgagaggttggccagctgccgacccctaccgattttgcccagggctggggccctattagttacgccaacggaagcggccccgaccaacgcccctactgctggcactatcccccaaagccttgcggcattgtgcccgcacagagcgtgtgtggcccggtgtattgcttcctcccagccccgtggtggtgggaacgaccgacaaggcgggcgcgcctacctacagatggggtgcaaacgatacggacgtcttcgtccttaacaacaccaggccaccactgggcaattggttcggttgacctggatgaactcaactggatacaccaaagtgtgcggggcgcccccctgcgtcatcggaggggtgggcaacaagaccttgcactgccccaccgattgtttccgcaagcatccggaagccacatactctcggtgcggctccgtccctggattacacccaggtgtctggtcgactatccgtataggctttggcattacccttgtaccatcaactacaccgtgttcaaagtcaggatgtacgtgggaggggtcgagcataggctggaggcgcctgcaactggacgcggggcgaacgttgcaatctggaagacagggacaggtccgagctcagcccgttgctgctgtccaccacacagtggcaagtccttccgtgttccttcacgaccctgccagccttgtccaccggcctctccacctccaccagaacattgtggacgtgcagtacttatacggggtggggtcaagcatcgcgtcctgggccatcaagtgggagtacgtcgttctcctattccttctgctcgcagacgcgcgcgtctgtcctgcttgtggatgatgttactcatatcccaagcggaggcggctttggagaacctcgtagtgctcaatgcagcatctttggccgggacacacggtcttgtgtccctcctcgtgttcttctgctttgcgtggtacctgaaggtaggtgggtgcccggagcggtctacgccctctacgggatgtggcctctcctcctgctcctattggcgttgccccagcgggcatatgcgttggacacggaggtggccgcgtcgtgtggcggcgctgtcttgtcgggttgatggcgctgactctgtcaccatattacaagcgctatgtcagctggtgcttatggtggcttcagtactttctgaccagagcagaagcgcaactgcacgtgtgggttccccctctcgacgtccgagggggggcgacgccgtcatcttactcatgtgtgctgtacgcccggctttggtgtttgacatcaccaagctgctgctggccgtcctcggacccctctggattctccaagccagtttgcttaaagtgccctacttgtgcgcgttcaaggccttctccggatctgcgcgctagcgcggaagatggcggggggtcattacgtgcaaatggtcatcatcaagttgggggcgctcactggcacttatgtgtataaccatctcactcctcttcgggactggcgcacaacggcctgcgagatctggctgtggctgtagagccagtcgtcttctcccgaatggagaccaacctcatcacgtggggggcagacaccgccgcatgcggcgacatcatcaacggcttgcccgttccgcccgcaggggccgggagatactgctcggaccagccgacggaatggtctccaaggggtggaggttgctggcacccatcacggcatacgcccagcagacaaggggcctcctagggtgtataatcaccagcctaaccggcgggacaaaaatcaggtggagggtgaggtccagattgtgtcaactgctgcccaaacctttctggcaacgtgcatcaatggagtatgctggaccgtctaccacggggccggaacgaggaccatcgcatccccaagggtcctgttatccagatgtacaccaatgtagataaagatctcgtgggttggcccgctcctcaaggttcccgttctttggcaccctgcacctgcggctcctcggacctttatctggtcacgaggcacgccgatgtcttcccgtgcgccggcggggtgatagcaggggcagcctgctttcgccccggcccatttcctacttgaaaggctcctcggggggtccgctgttgtgccccgcggggcacgccgtgggcattttcagggcgcggtgtgcacccgtggagtggctaaggcagtggactttatccctgtagagaacctagagacaaccatgaggtccccggtgttcacggacaactcctctccaccagcagtaccccagagcttccaggtggcccacctgcatctcccacaggcagcggcaagagcaccaaggtcccagctgcatacgcagctcagggctataaggtgctagtgctcaacccctctgttgctgcaacactaggcttcggtgcttatatgtccaaggcccagggatcgaccctaacatcaggaccggggtgagaacaattaccactggcagccccatcacgtactccacctacggcaagttccttgccgacggcgggtgctcagggggtgcttatgacataataatctgtgacgagtgccacccacggatgccacgtccatcttaggcatcggcaccgtccttgaccaagcagagaccgcaggggcgaggcttgttgtgctcgccaccgctacccctccgggctccatcactgtgccccatcctaacatgaggaggttgctctgtccaccaccggagagatccccttttatggcaaggctatccccctcgaagtaatcaagggggggaggcatctcatcttctgtcattcaaagaagaagtgtgacgagctcgctgcaaagctggttgcatgggcgtcaatgccgtggcctattaccgcggtcttgacgtgtctgtcatcccgaccagcggcgatgttgtcgtcgtggcaactgatgctctcatgaccggctataccggcgacttcgactcggtgatgactgcaacacgtgtgtcacccagacagtcgatttcagccttgaccccaccttcaccattgagacaaccacgcttccccaggatgctgtctcccgtacacaacggcggggcaggactggcagggggaagccaggcacctacggtttgtggcaccgggggagcgcccctctggcatgttcgactcgtctgtcctctgtgagtgctatgacgcgggctgtgcttggtatgagctcacgcccgccgagaccacagttaggctacgagcgtaatgaacaccccggggcttcccgtgtgccaggaccaccttgaattttgggagggcgtctttacgggccttacccatatagatgcccacttcctatcccagacaaagcagagtggggagaaccttccttacctggtagcgtacaagccaccgtgtgcgctagggctcaagcccctcccccgtcgtgggaccagatgtggaagtgtttagtccgcctcaagcccaccctccatgggccaacacccctgctatacagattgggcgctgttcaaatgaagtcaccctgacacacccaatcacaaaatacatcatgacatgtatgtcggctga

SEQ ID NO: 245 - DNA, 4869 bp, Hepatitis C virus
tcgcccacaggacgtcaagttcccgggtggcggtcagatcgttggtggagtttacttgttgccgcgcaggggccctagattgggtgtgcgcgcgacgaggaagacttccgagcggtcgcaacctcgagtagacgtcagcctatccccaaggcacgtcggcccgagggcaggacctgggctcagcccgggtacccctggcccctctatggcaatgagggctgcgggtgggcgggatggctcctgtctccccgtggtctcggcctaactggggccccacagacccccggcgtaggtcgcgtaatttgggtaaggtcatcgatacccttacatgcggcttcgccgacctcatggggtacataccgctcgtcggcgcccctcttgggggcgctgccaggccctggcgcatggcgtccgggttctggaagacggcgtgaactatgcaacagggaaccttcctggttgctctttctctatcttccttctggctttgctctcttgcctgactgtgcctgcttcagcctacaagtgcgcaactccacggggctttatcatgtcaccaatgattgccctaactcgagtattgtgtacgaggcggacgatgctatcctgcacactccggggtgtgtcccttgcgtccgcgagggtaacggctcgaggtgttggtggcgataacccccacggtggccaccagggacggcaaactccccacagtgcagcttcgacgtcacatcgatctgctcgtcgggagcgctaccctttgttcggccctttacgtgggggacctgtgcggtctgtctttcttgtcggccaactgttcaccttctctcccaggcgccactggacaacgcaggactgcaattgttccatctatcccggccatataacgggtcaccgtatggcatgggacatgatgatgaactggtcccctacgcggcgctggtagtagctcagatgctccggatcccacaagccatcctggacatgatcgctggtgctcactggggagtcctggcgggcatagcgtatttctccatggtggggaactgggcgaaggtcctgtagtgctgctgctatttgccggcgtcgacgcgggaacccacgtcaccgggggcattgccgcccgtaccacgtctagaattgctggtctcttcaacccaggcgcccagcaggacatccagctggttaacaccaacggcagtggcacatcaacagaacggccttgaactgtaacgatagccttcacaccggctggatagcggggcttttctatcgctacaaattcaactcttcaggctgtcccgagaggttggccagctgccgacccctaccgattttgcccagggctggggccctattagttacgccaacggaagcggccccgaccaacgcccctactgctggcactatcccccaaagccttgcggcattgtgcccgcacagagcgtgtgtggcccggtgtattgcttcctcccagccccgtggtggtgggaacgaccgacaaggcgggcgcgcctacctacagatggggtgcaaacgatacggacgtcttcgtccttaacaacaccaggccaccactgggcaattggttcggttgacctggatgaactcaactggatacaccaaagtgtgcggggcgcccccctgcgtcatcggaggggtgggcaacaagaccttgcactgccccaccgattgtttccgcaagcatccggaagccacatactctcggtgcggctccgtccctggattacacccaggtgtctggtcgactatccgtataggctttggcattacccttgtaccatcaactacaccgtgttcaaagtcaggatgtacgtgggaggggtcgagcataggctggaggcgcctgcaactggacgcggggcgaacgttgcaatctggaagacagggacaggtccgagctcagcccgttgctgctgtccaccacacagtggcaagtccttccgtgttccttcacgaccctgccagccttgtccaccggcctctccacctccaccagaacattgtggacgtgcagtacttatacggggtggggtcaagcatcgcgtcctgggccatcaagtgggagtacgtcgttctcctattccttctgctcgcagacgcgcgcgtctgtcctgcttgtggatgatgttactcatatcccaagcggaggcggctttggagaacctcgtagtgctcaatgcagcatctttggccgggacacacggtcttgtgtccctcctcgtgttcttctgctttgcgtggtacctgaaggtaggtgggtgcccggagcggtctacgccctctacgggatgtggcctctcctcctgctcctattggcgttgccccagcgggcatatgcgttggacacggaggtggccgcgtcgtgtggcggcgctgtcttgtcgggttgatggcgctgactctgtcaccatattacaagcgctatgtcagctggtgcttatggtggcttcagtactttctgaccagagcagaagcgcaactgcacgtgtgggttccccctctcgacgtccgagggggggcgacgccgtcatcttactcatgtgtgctgtacgcccggctttggtgtttgacatcaccaagctgctgctggccgtcctcggacccctctggattctccaagccagtttgcttaaagtgccctacttgtgcgcgttcaaggccttctccggatctgcgcgctagcgcggaagatggcggggggtcattacgtgcaaatggtcatcatcaagttgggggcgctcactggcacttatgtgtataaccatctcactcctcttcgggactggcgcacaacggcctgcgagatctggctgtggctgtagagccagtcgtcttctcccgaatggagaccaacctcatcacgtggggggcagacaccgccgcatgcggcgacatcatcaacggcttgcccgttccgcccgcaggggccgggagatactgctcggaccagccgacggaatggtctccaaggggtggaggttgctggcacccatcacggcatacgcccagcagacaaggggcctcctagggtgtataatcaccagcctaaccggcgggacaaaaatcaggtggagggtgaggtccagattgtgtcaactgctgcccaaacctttctggcaacgtgcatcaatggagtatgctggaccgtctaccacgggaccggaacgaggaccatcgcatccccaagggtcctgttatccagatgtacaccaatgtagataaagatctcgtgggttggcccgctcctcaaggttcccgttctttggcaccctgcacctgcggctcctcggacctttatctggtcacgaggcacgccgatgtcttcccgtgcgccggcggggtgatagcaggggcagcctgctttcgccccggcccatttcctacttgaaaggctcctcggggggtccgctgttgtgccccgcggggcacgccgtgggcattttcagggcgcggtgtgcacccgtggagtggctaaggcagtggactttatccctgtagagaacctagagacaaccatgaggtccccggtgttcacggacaactcctctccaccagcagtaccccagagcttccaggtggcccacctgcatctcccacaggcagcggcaagagcaccaaggtcccagctgcatacgcagctcagggctataaggtgctagtgctcaacccctctgttgctgcaacactaggcttcggtgcttatatgtccaaggcccagggatcgaccctaacatcaggaccggggtgagaacaattaccactggcagccccatcacgtactccacctacggcaagttccttgccgacggcgggtgctcagggggtgcttatgacataataatctgtgacgagtgccacccacggatgccacgtccatcttaggcatcggcaccgtccttgaccaagcagagaccgcaggggcgaggcttgttgtgctcgccaccgctacccctccgggctccatcactgtgccccatcctaacatgaggaggttgctctgtccaccaccggagagatccccttttatggcaaggctatccccctcgaagtaatcaagggggggaggcatctcatcttctgtcattcaaagaagaagtgtgacgagctcgctgcaaagctggttgcatgggcgtcaatgccgtggcctattaccgcggtcttgacgtgtctgtcatcccgaccagcggcgatgttgtcgtcgtggcaactgatgctctcatgaccggctataccggcgacttcgactcggtgatgactgcaacacgtgtgtcacccagacagtcgatttcagccttgaccccaccttcaccattgagacaaccacgcttccccaggatgctgtctcccgtacacaacggcggggcaggactggcagggggaagccaggcacctacggtttgtggcaccgggggagcgcccctctggcatgttcgactcgtctgtcctctgtgagtgctatgacgcgggctgtgcttggtatgagctcacgcccgccgagaccacagttaggctacgagcgtaatgaacaccccggggcttcccgtgtgccaggaccaccttgaattttgggagggcgtctttacgggccttacccatatagatgcccacttcctatcccagacaaagcagagtggggagaaccttccttacctggtagcgtacaagccaccgtgtgcgctagggctcaagcccctcccccgtcgtgggaccagatgtggaagtgtttagtccgcctcaagcccaccctccatgggccaacacccctgctatacagattgggcgctgttcaaatgaagtcaccctgacacacccaatcacaaaatacatcatgacatgtatgtcggctga

SEQ ID NO: 246 - DNA, 4869 bp, Hepatitis C virus; identical to SEQ ID NO: 218

SEQ ID NO: 247 - DNA, 4869 bp, Hepatitis C virus; identical to SEQ ID NO: 194

SEQ ID NO: 248 - DNA, 4869 bp, Hepatitis C virus; identical to SEQ ID NO: 209

SEQ ID NO: 249 - DNA, 4869 bp, Hepatitis C virus; identical to SEQ ID NO: 218

SEQ ID NO: 250 - DNA, 4869 bp, Hepatitis C virus
tcgcccacaggacgtcaagttcccgggtggcggtcagatcgttggtggagtttacttgttgccgcgcaggggccctagattgggtgtgcgcgcgacgaggaagacttccgagcggtcgcaacctcgagtagacgtcagcctatccccaaggcacgtcggcccgagggcaggacctgggctcagcccgggtacccctggcccctctatggcaatgaaggctgcgggtgggcgggatggctcctgtctccccgtggtctcggcctaattggggccccacagacccccggcgtaggtcgcgtaatttgggtaaggtcatcgatacccttacatgcggcttcgccgacctcatggggtacataccgctcgtcggcgcccctcttgggggcgctgccaggccctggcgcatggcgtccgggttctggaagacggcgtgaactatgcaacagggaaccttcctggttgctctttctctatcttccttctggctttgctctcttgcctgactgtgcctgcttcagccttcaagtgcgcaactccacggggctttatcatgtcaccaatgattgccctaactcgagtattgtgtacgaggcggacgatgctatcctgcacactccggggtgtgtcccttgcgtccgcgagggtaacggctcgaggtgttggtggcgataacccccacggtggccaccagggacggcaaactccccacagtgcagcttcgacgtcacatcgatctgcttgtcgggagcgctaccctttgttcggccctttacgtgggggacctgtgcggtctgtctttcttgtcggccaactgttcaccttctctcccaggcgccactggacaacgcaggactgcaattgttccatctatcccggccatataacgggtcaccgtatggcatgggacatgatgatgaactggtcccctacgcggcgctggtagtagctcagatgctccggatcccacaagccatcctggacatgatcgctggtgctcactggggagtcctggcgggcatagcgtatttctccatggtggggaactgggcgaaggtcctgtagtgctgctgctatttgccggcgtcgacgcgggaacccacgtcaccgggggcattgccgcccgtaccacgtctggagttgctggtctcttcagcccaggcgcccagcaggacatccagctggttaacaccaacggcagtggcacatcaacagaacggccttgaactgtaacgatagccttcacaccggctggatagcggggcttttctatcgctacaaattcaactcttcaggctgtcccgagaggttggccagctgccgacccctaccgattttgcccagggctggggccctattagttacgccaacggaagcggccccgaccaacgcccctactgctggcactatcccccaaagccttgcggcattgtgcccgcacagagcgtgtgtggcccggtgtattgcttcctcccagccccgtggtggtgggaacgaccgacaaggcgggcgcgcctacctacagatggggtgcaaacgatacggacgtcttcgtccttaacaacaccaggccaccactgggcaattggttcggttgacctggatgaactcaactggatacaccaaagtgtgcggggcgcccccctgcgtcatcggaggggtgggcaacaagaccttgcactgccccaccgattgtttccgcaagcatccggaagccacatactctcggtgcggctccgtccctggattacacccaggtgtctggtcgactatccgtataggctttggcattacccttgtaccatcaactacaccgtgttcaaagtcaggatgtacgtgggaggggtcgagcataggctagaggcgcctgcagctggacgcggggcgaacgttgcaatctggaagacagggacaggtccgagctcagcccgttgctgctgtccaccacacagtggcaagtccttccgtgttccttcacgaccctgccagccttgtccaccggcctctccacctccaccagaacattgtggacgtgcagtacttatacggggtggggtcaagcatcgcgtcctgggccatcaagtgggagtacgtcgttctcctattccttctgctcgcagacgcgcgcgtctgtcctgcttgtggatgatgttactcatatcccaagcggaggcggctttggagaacctcgtagtgctcaatgcagcatctttggccgggacacacggtcttgtgtccctcctcgtgttcttctgctttgcgtggtacctgaaggtaggtgggtgcccggagcggtctacgccctctacgggatgtggcctctcctcctgctcctattggcgttgccccagcgggcatatgcgttggacacggaggtggccgcgtcgtgtggcggcgctgtcttgtcgggttgatggcgctgactctgtcaccatattacaagcgctatgtcagctggtgcttatggtggcttcagtactttctgaccagagcagaagcgcaactgcacgtgtgggttccccctctcgacgtccgagggggggcgacgccgtcatcttactcatgtgtgctgtacgcccgactttggtgtttgacatcaccaagctgctgctggccgtcctcggacccctctggattctccaagccagtttgcttaaagtgccctacttgtgcgcgttcaaggccttctccggatctgcgcgctagcgcggaagatggcggggggtcattacgtgcaaatggtcatcatcaagttgggggcgctcactggcacttatgtgtataaccatctcactcctcttcgggactggcgcacaacggcctgcgagatctggctgtggctgtagagccagtcgtcttctcccgaatggagaccgacctcatcacgtggggggcagacaccgccgcatgcggcgacgtcatcaacggcttgcccgttccgcccgcaggggccgggagatactgctcggaccagccgacggaatggtctccaaggggtggaggttgctggcacccatcacggcatacgcccagcagacaaggggcctcctagggtgcataatcaccagcctaaccggcgggacaaaaatcaggtggagggtgaggtccagattgtgtcaactgctgcccaaacctttctggcgacgtgcatcaatggagtatgctggaccgtctaccacggggccggaacgaggaccatcgcatccccaagggtcctgttatccagatgtacaccaatgtagacaaagatcttgtgggttggcccgctcctcaaggttcccgttctttggcaccctgcacctgcggctcctcggacctttatctggtcacgaggcacgccgatgtcttcccgtgcgccggcggggtgatagcaggggcagcctgctttcgccccggcccatttcctacttgaaaggctcctcggggggtccgctgttgtgccccgcggggcacgccgtgggcattttcagggcgcggtgtgcacccgtggagtggctaaggcagtggactttatccctgtagagaacctagagacaaccatgaggtccccggtgttcacggacaactcctctccaccagcagtaccccagagcttccaggtggcccacctgcatctcccacaggcagcggcaagagcaccaaggtcccagctgcatacgcagctcagggctataaggtgctagtgctcaacccctctgttgctgcaacactaggcttcggtgcttatatgtccaaggcccagggatcgaccctaacatcaggaccggggtgagaacaattaccactggcagccccatcacgtactccacctacggcaagttccttgccgacggcgggtgctcagggggtgcttatgacataataatctgtgacgagtgccacccacggatgccacgtccatcttaggcatcggcaccgtccttgaccaagcagagaccgcaggggcgaggcttgttgtgctcgccaccgctacccctccgggctccatcaccgtgccccatcctaacatgaggaggttgctctgtccaccaccggagagatccccttttatggcaaggctatccccctcgaagtaatcaagggggggaggcatctcatcttctgtcattcaaagaagaagtgtgacgagctcgctgcaaagctggttgcatgggcgtcaatgccgtggcctattaccgcggtctcgacgtgtctgtcatcccgaccagcggcgatgttgtcgtcgtggcaactgatgctctcatgaccggctataccggcgacttcgactcggtgatgactgcaacacgtgtgtcacccagacagtcgatttcagccttgaccccaccttcaccattgagacaaccacgcttccccaggatgctgtctcccgtacacaacggcggggcaggactggcagggggaagccaggcacctacggtttgtggcaccgggggagcgcccctctggcatgttcgactcgtctgtcctctgtgagtgctatgacgcgggctgtgcttggtatgagctcacgcccgccgagaccacagttaggctacgagcgtaatgaacaccccggggcttcccgtgtgccaggaccaccttgaattttgggagggcgtctttacgggccttacccatatagatgcccacttcctatcccagacaaagcagagtggggagaaccttccttacctggtagcgtacaagccaccgtgtgcgctagggctcaagcccctcccccatcgtgggaccagatgtggaagtgtttagtccgcctcaagcccaccctccatgggccaacacccctgctatacagattgggcgctgttcaaatgaagtcaccctgacacacccaatcacaaaatacatcatgacatgtatgtcggctga

SEQ ID NO: 251 - DNA, 4853 bp, Hepatitis C virus
tcgcccacaggacgtcaagttcccgggtggcggtcagatcgttggtggagtttacttgttgccgcgcaggggccctagattgggtgtgcgcgcgacgaggaagacttccgagcggtcgcaacctcgagcagacgtcagcctatccccaaggcacgtcggcccgagggcaggacctgggctcagcccgggtacccctggcccctctatggcaatgagggctgtgggtgggcgggatggctcctgtctccccgtggtctcggcctagctggggcccctcagacccccggcgtaggtcgcgtaatttgggtaaagtcatcgatacccttacatgcggcttcgccgacctcatggggtacataccgctcgtcggcgctcctcttgggggcgctgccaggccctggcgcatggcgtccgggttctggaagacggcgtgaactatgcaacagggaaccttcctggttgctctttctctatcttcctcctggctttgctctcttgcctgactgtgcctgcttcagcctacaagtgcgcaactccacggggctttatcatgtcaccaatgattgccctaactcgagtattgtgtacgaggcggccgatgctatcctgcacactccggggtgtgtcccttgcgtctacgagggtaacgcctcgaggtgttggtggcgataacccccacggtggccaccagggatggcaaactccccacagtccagcttcgacgtcacatcgatctgcttgtcgggagcgctaccctttgttcggccctttacgtgggggacctgtgcggtctgtctttcttgtcggccaactgttcaccttctctcccaggctccactggacaacgcaggactgcaattgttccatctaccccggccatataacgggtcaccgtatggcgtgggacatgatgatgaactggtcccctacgcggcgctggtagtagctcagatgctccggatcccgcaagccatcttggacatgatcgctggtgctcactggggagtcctagcgggcatagcgtatttctccatggtggggaactgggcgaaggtcctgtagtgctgctgctatttgccggcgtcgacgcggaaacccacgtcaccgggggagctgccggccgtaccatggctggatttactggtctctttacacaaggcgccaagcagagcatccagttggttaacaccaacggcagtggcacatcaacagaacggctttgaactgcaacgatagccttcagaccggctggatagcggggcttctctatcacaacaaattcaactcttcaggctgtcccgagaggttggccagctgccgacccctaccgattttgcccagggctggggccctatcagctacgccaacggaagcggccccgaccaacgcccctactgctggcactaccccccaaagccttgcggcattgtgcccgcacagagcgtatgtggcccggtatattgtttcctcctagccccgtggtggtgggaacgaccgacaggtcgggcgcgcctacctacggatggggtgcaaacgatacggacgtcttcgtccttaacaacaccaggccaccactgggcaattggttcggttgacctggatgaactcaactggatacaccaaagtgtgcggggcgcccccctgtgccatcagaggggtgggcaacaacaccttgcactgccccaccgattgtttccgcaagcatccggaagccacatactctcggtgcggctccgtccctggattacacccaggtgcctggtcaactacccgtataggctttggcattacccttgtaccatcaactacaccgtgttcaaggtcaggatgtacgtgggaggggtcgagcacaggctagaggcgcctgcaactggacgcggggcgaacgttgcagtctggaagacagggacaggtccgagctcagcccgttgctgctgtccaccacacagtggcaggtccttccctgttccttcacgaccctgccagccttgtccaccggcctctccacctccaccagaacattgtggacgtgcagtacttatacggggtggggtcaagtatcgcgtcctgggccatcaagtgggagtacgtcgttctcctattccttctgcttgcagacgcgcgcgtctgtcctgcttgtggatgatgttactcatatcccaagcggaggcggccttggagaacctcgtagtgctcaatgcagcatctttggccgggacgcatggtcttgtgtccttcctcgtgttcttctgctttgcgtggtacctgaaggtaggtgggtgcccggagcggcctacgccctctacgggatgtggcctctcctcctgctcctgttggcgttgccccagcgggcatacgcgttggacacggaggtggccgcgtcgtgtggcggcgctgtcttgtcgggttgatggcgctgactctgtcaccacattacaagcgatatgtcagctggtgcttgtggtggcttcagtactttctgaccagagcagaagcgcaactacacgtgtgggttccccccctcgacgtccgagggggggcgacgccgtcatcttactcatgtgtgctgtacgcccgactttggtgtttgacatcaccaagctgctgctggccgtcttcgggcccctttggattctccaggccagtttgcttaaagtaccctacttgtgcgcgttcaaggccttctccggatctgcgcgctagcgcggaagatggcggggggtcattacgtgcaaatggtcatcatcaaactaggggcgctcactggcacctatgtttataaccacctcactcctcttcgggactggcgcacaacggcctgcgagatctggctgtggctgtagagccagtcgtcttctcccgaatggagaccaacctcatcacgtggggggcagacaccgccgcgtgcggtgacatcatcaacggcttgcccgttccgcccgtaggggccgggagatactgctcggaccagccgacggaatggtctccaaggggtggaggttgctggcacccatcacggcatacgcccagcagacaaggggcctcctagggtgtataatcaccagcctaaccggcgggacaaaaaccaggtggagggtgaggtccagattgtgtcaactgctgcccaaactttcctggcaacgtgcatcaatggagtatgctggaccgtctaccacggggccgggacgaggaccatcgcatccccaagggtcctgtcatccagatgtacaccaatgtagacaaagatcttgtgggctggcccgctccccaaggttcccgttcattgacaccctgcacctgtggctcctcggacctttatctggtcacgaggcacgccgatgtcttcccgtgcgccggcggggtgatagcaggggcagcctgctttcgccccggcccatttcctacttgaaaggctcctcggggggtccgctgttgtgccccgcggggcatgctgtgggcatattcagggcgcagtgtgcacccgtggagtggctaaggcggtggactttatccctgtagagaacctagagacaaccatgaggtccccggtgttcacggacaactcctctccaccggcagtaccccagagcttccaggtggcccacctgcatctcccacaggcagcggcaagagcaccaaggtcccggctgcatatgcagctcagggctataaggtgctagtgctcaacccctctgttgctgcaacactgggcttcggtgtttatatgtccaaggcccagggatcgatcctaacatcaggaccggggtgagaacaattaccactggcagccccatcacgtactccacctacggcaagttccttgccgacggcgggtgctcagggggtgcttatgacataataatctgtgacgagtgccacccacggatgccacatctatcttaggcatcggcaccgtccttgaccaagcagagaccgcgggggcgaggcttgttgtgctcgccaccgctactcctccgggctccgtcaccgtgccccatcctaacatgaggaggttgctctgtccaccaccggagagatccctttttatggcaaggctatccccctcgaagtaatcaagggggggaggcatctcatcttctgtcattcaaagaagaagtgtgacgagctcgccgcaaagctggttgcatgggcgtcaatgccgtggcctattaccgcggccttgacgtgtctgtcatcccgaccagcggcgatgttgtcgtcgtggcaactgatgctctcatgaccggctataccggcgacttcgactcggtgatgactgcaatacgtgtgtcacccagacagttgatttcagccttgaccccaccttcaccattgagacaaccacgcttccccaggatgctgtctcccgtacacaacgtcggggcaggactggcagggggaagccaggcacctacgatttgtggcaccgggggagcgcccctccggcatgttcgactcgtctgtcctctgtgagtgctatgacgcgggctgtgcttggtatgagctcacgcccgccgagactacagttaggctacgagcgtaatgaacaccccggggcttcccgtgtgccaggaccaccttgaattttgggagggcgtctttacgggccttactcatatagatgcccacttcctatcccagacaaagcagagtggggagaaccttccttacctggtagcgtacaagccaccgtgtgcgctagggctcaagcccctcccccatcgtgggaccagatgtggaagtgcttggtccgcctcaagcccaccctccatgggccaacacccctgctatacagattgggcgctgttcaaatgaagtcaccctgacacacccaatcacaaaatacatcatga

SEQ ID NO: 252 - DNA, 4869 bp, Hepatitis C virus; identical to SEQ ID NO: 194

SEQ ID NO: 253 - DNA, 4869 bp, Hepatitis C virus
tcgcccacaggacgtcaagttcccgggtggcggtcagatcgttggtggagtttacttgttgccgcgcaggggccctagattgggtgtgcgcgcgacgaggaagacttccgagcggtcgcaacctcgagcagacgtcagcctatccccaaggcacgtcggcccgagggcaggacctgggctcagcccgggtacccctggcccctctatggcaatgagggctgtgggtgggcgggatggctcctgtctccccgtggtctcggcctagctggggcccctcagacccccggcgtaggtcgcgtaatttgggtaaagtcatcgatacccttacatgcggcttcgccgacctcatggggtacataccgctcgtcggcgctcctcttgggggcgctgccaggccctggcgcatggcgtccgggttctggaagacggcgtgaactatgcaacagggaaccttcctggttgctctttctctatcttcctcctggctttgctctcttgcctgactgtgcctgcttcagcctacaagtgcgcaactccacggggctttatcatgtcaccaatgattgccctaactcgagtattgtgtacgaggcggccgatgctatcctgcacactccggggtgtgtcccttgcgtctacgagggtaacgcctcgaggtgttggtggcgataacccccacggtggccaccagggatggcaaactccccacagtccagcttcgacgtcacatcgatctgcttgtcgggagcgctaccctttgttcggccctttacgtgggggatctgtgcggtctgtttttcttgtcggccaactgttcaccttctctcccaggctccactggacaacgcaggactgcaattgttccatctaccccggccatataacgggtcaccgtatggcatgggacatgatgatgaactggtcccctacgcggcgctggtagtagctcagatgctccggatcccgcaagccatcttggacatgatcgctggtgctcactggggagtcctagcgggcatagcgtatttctccatggtggggaactgggcgaaggtcctgtagtgctgctgctatttgccggcgtcgacgcggaaacccacgtcaccgggggagctgccggccgtaccatggctggatttactggtctctttacacaaggcgccaagcagagcatccagttggttaacaccaacggcagtggcacatcaacagaacggctttgaactgcaacgatagccttcagaccggctggatagcggggcttctctatcacaacaaattcaactcttcaggctgtcccgagaggttggccagctgccgacccctaccgattttgcccagggctggggccctatcagttacgccaacggaagcggccccgaccaacgcccctactgctggcactaccccccaaagccttgcggcattgtgcccgcacagagcgtatgtggcccggtatattgtttcctcctagccccgtggtggtgggaacgaccgacaggtcgggcgcgcctacctacggatggggtgcaaacgatacggacgtcttcgtccttaacaacaccaggccaccactgggcaattggttcggttgacctggatgaactcaactggatacaccaaagtgtgcggggcgcccccctgtgccatcagaggggtgggcaacaacaccttgcactgccccaccgattgtttccgcaagcatccggaagccacatactctcggtgcggctccgtccctggattacacccaggtgcctggtcaactacccgtataggctttggcattacccttgtaccatcaactacaccgtgttcaaggtcaggatgtacgtgggaggggtcgagcataggctagaggcgcctgcaactggacgcggggcgaacgttgcagtctggaagacagggacaggtccgagctcagcccgttgctgctgtccaccacacagtggcaggtccttccctgttccttcacgaccctgccagccttgtccaccggcctctccacctccaccagaacattgtggacgtgcagtacttatacggggtggggtcaagtatcgcgtcctgggccatcaagtgggagtacgtcgttctcctattccttctgcttgcagacgcgcgcgtctgtcctgcttgtggatgatgttactcatatcccaagcggaggcggccttggagaacctcgtagtgctcaatgcagcatctttggccgggacgcatggtcttgtgtccttcctcgtgttcttctgctttgcgtggtacttgaaggtaggtgggtgcccggagcggcctacgccctctacgggatgtggcctctcctcctgctcctgttggcgttgccccagcgggcatacgcgttggacacggaggtggccgcgtcgtgtggcggcgctgtcttgtcgggttgatggcgctgactctgtcaccacattacaagcgatatgtcagctggtgcttgtggtggcttcagtactttctgaccagagcagaagcgcaactgcacgtgtgggttccccccctcgacgtccgagggggggcgacgccgtcatcttactcatgtgtgctgtacgcccgactttggtgtttgacatcaccaagctgctgctggccgtcttcgggcccctttggattctccaagccagtttgcttaaagtaccctacttgtgcgcgttcaaggccttctccggatctgcgcgctagcgcggaagatggcggggggtcattacgtgcaaatggtcatcatcaaactaggggcgctcactggcacctatgtttataaccacctcactcctcttcgggactggcgcacaacggcctgcgagatctggctgtggctgtagagccagtcgtcttctcccgaatggagaccaacctcatcacgtggggggcagacaccgccgcgtgcggtgacatcatcaacggcttgcccgttccgcccgtaggggccgggagatactgctcggaccagccgacggaatggtctccaaggggtggaggttgctggcacccatcacggcatacgcccagcagacaaggggcctcctagggtgtataatcaccagcctaaccggcgggacaaaaaccaggtggagggtgaggtccagattgtgtcaactgctgcccaaactttcctggcaacgtgcatcaatggagtatgctggaccgtctaccacggggccgggacgaggaccatcgcatccccaagggtcctgtcatccagatgtacaccaatgtagacaaagatcttgtgggctggcccgctccccaaggttcccgttcattgacaccctgcacctgcggctcctcggacctttatctggtcacgaggcacgccgatgtcttcccgtgcgccggcggggtgatagcaggggcagcctgctttcgccccggcccatttcctacttgaaaggctcctcggggggtccgctgttgtgccccgcggggcatgctgtgggcatattcagggcgcagtgtgcacccgtggagtggctaaggcggtggactttatccctgtagagaacctagagacaaccatgaggtccccggtgttcacggacaactcctctccaccggcagtaccccagagcttccaggtggcccacctgcatctcccacaggcagcggcaagagcaccaaggtcccggctgcatacgcagctcagggctataaggtgctagtgctcaacccctctgttgctgcaacactgggcttcggtgtttatatgtccaaggcccagggatcgatcctaacatcaggaccggggtgagaacaattaccactggcagccccatcacgtactccacctacggcaagttccttgccgacggcgggtgctcagggggtgcttatgacataataatctgtgacgagtgccacccacggatgccacatctatcttaggcatcggcaccgtccttgaccaagcagagaccgcgggggcgaggcttgttgtgctcgccaccgctacccctccgggctccgtcaccgtgccccatcctaacatgaggaggttgctctgtccaccaccggagagatccctttttatggcaaggctatccccctcgaagtaatcaagggggggaggcatctcatcttctgtcattcaaagaagaagtgtgacgagctcgccgcaaagctggttgcatgggcgtcaatgccgtggcctattaccgcggccttgacgtgtctgtcatcccgaccagcggcgatgttgtcgtcgtggcaactgatgctctcatgaccggctataccggcgacttcgactcggtgatgactgcaatacgtgtgtcacccagacagttgatttcagccttgaccccaccttcaccattgagacaaccacgcttccccaggatgctgtctcccgtacacaacgtcggggcaggactggcagggggaagccaggcacctacgatttgtggcaccgggggagcgcccctccggcatgttcgactcgtctgtcctctgtgagtgctatgacgcgggctgtgcttggtatgagctcacgcccgccgagactacagttaggctacgagcgtaatgaacaccccggggcttcccgtgtgccaggaccaccttgaattttgggagggcgtctttacgggccttactcatatagatgcccacttcctatcccagacaaagcagagtggggagaaccttccttacctagtagcgtacaagccaccgtgtgcgctagggctcaagcccctcccccatcgtgggaccagatgtggaagtgcttggtccgcctcaagcccaccctccatgggccaacacccctgctatacagattgggcgctgttcaaatgaagtcaccctgacacacccaatcacaaaatacatcatgacatgtatgtcggctga

SEQ ID NO: 254 - DNA, 4869 bp, Hepatitis C virus; identical to SEQ ID NO: 194

SEQ ID NO: 255 - DNA, 4869 bp, Hepatitis C virus; identical to SEQ ID NO: 194

SEQ ID NO: 256 - DNA, 4869 bp, Hepatitis C virus
tcgcccacaggacgtcaagttcccgggtggcggtcagatcgttggtggagtttacttgttgccgcgcaggggccctagattgggtgtgcgcgcgacgaggaagacttccgagcggtcgcaacctcgagtagacgtcagcctatccccaaggcacgtcggcccgagggcaggacctgggctcagcccgggtacccctggcccctctatggcaatgagggctgcgggtgggcgggatggctcctgtctccccgtggtctcggcctaactggggccccacagacccccggcgtaggtcgcgtaatttgggtaaggtcatcgatacccttacatgcggcttcgccgacctcatggggtacataccgctcgtcggcgcccctcttgggggcgctgccaggccctggcgcatggcgtccgggttctggaagacggcgtgaactatgcaacagggaaccttcctggttgctctttctctatcttccttctggctttgctctcttgcctgactgtgcctgcttcagcccacaagtgcgcaactccacggggctttatcatgtcaccaatgattgccctaactcgagtattgtgtacgaggcggacgatgctatcctgcacactccggggtgtgtcccttgcgtccgcgagggtaacggctcgaggtgttggtggcgataacccccacggtggccaccagggacggcaaactccccacagtgcagcttcgacgtcacatcgatctgctcgtcgggagcgctaccctttgttcggccctttacgtgggggacctgtgcggtctgtctttcttgtcggccaactgttcaccttctctcccaggcgccactggacaacgcaggactgcaattgttccatctatcccggccatataacgggtcaccgtatggcatgggacatgatgatgaactggtcccctacgcggcgctggtagtagctcagatgctccggatcccacaagccatcctggacatgatcgctggtgctcactggggagtcctggcgggcatagcgtatttctccatggtggggaactgggcgaaggtcctgtagtgctgctgctatttgccggcgtcgacgcgggaacccacgtcaccgggggcattgccgcccgtaccacgtctagaattgctggtctcttcaacccaggcgcccagcaggacatccagctggttaacaccaacggcagtggcacatcaacagaacggccttgaactgtaacgatagccttcacaccggctggatagcggggcttttctatcgctacaaattcaactcttcaggctgtcccgagaggttggccagctgccgacccctaccgattttgcccagggctggggccctattagttacgccaacggaagcggccccgaccaacgcccctactgctggcactatcccccaaagccttgcggcattgtgcccgcacagagcgtgtgtggcccggtgtattgcttcctcccagccccgtggtggtgggaacgaccgacaaggcgggcgcgcctacctacagatggggtgcaaacgatacggacgtcttcgtccttaacaacaccaggccaccactgggcaattggttcggttgacctggatgaactcaactggatacaccaaagtgtgcggggcgcccccctgcgtcatcggaggggtgggcaacaagaccttgcactgccccaccgattgtttccgcaagcatccggaagccacatactctcggtgcggctccgtccctggattacacccaggtgtctggtcgactatccgtataggctttggcattacccttgtaccatcaactacaccgtgttcaaagtcaggatgtacgtgggaggggtcgagcataggctggaggcgcctgcaactggacgcggggcgaacgttgcaatctggaagacagggacaggtccgagctcagcccgttgctgctgtccaccacacagtggcaagtccttccgtgttccttcacgaccctgccagccttgtccaccggcctctccacctccaccagaacattgtggacgtgcagtacttatacggggtggggtcaagcatcgcgtcctgggccatcaagtgggagtacgtcgttctcctattccttctgctcgcagacgcgcgcgtctgtcctgcttgtggatgatgttactcatatcccaagcggaggcggctttggagaacctcgtagtgctcaatgcagcatctttggccgggacacacggtcttgtgtccctcctcgtgttcttctgctttgcgtggtacctgaaggtaggtgggtgcccggagcggtctacgccctctacgggatgtggcctctcctcctgctcctattggcgttgccccagcgggcatatgcgttggacacggaggtggccgcgtcgtgtggcggcgctgtcttgtcgggttgatggcgctgactctgtcaccatattacaagcgctatgtcagctggtgcttatggtggcttcagtactttctgaccagagcagaagcgcaactgcacgtgtgggttccccctctcgacgtccgagggggggcgacgccgtcatcttactcatgtgtgctgtacgcccggctttggtgtttgacatcaccaagctgctgctggccgtcctcggacccctctggattctccaagccagtttgcttaaagtgccctacttgtgcgcgttcaaggccttctccgggtctgcgcgctagcgcggaagatggcggggggtcattacgtgcaaatggtcatcatcaagttgggggcgctcactggcacttatgtgtataaccatctcactcctcttcgggactggcgcacaacggcctgcgagatctggctgtggctgtagagccagtcgtcttctcccgaatggagaccaacctcatcacgtggggggcagacaccgccgcatgcggcgacatcatcaacggcttgcccgttccgcccgcaggggccgggagatactgctcggaccagccgacggaatggtctccaaggggtggaggttgctggcacccatcacggcatacgcccagcagacaaggggcctcctagggtgtataatcaccagcctaaccggcgggacaaaaatcaggtggagggtgaggtccagattgtgtcaactgctgcccaaacctttctggcaacgtgcatcaatggagtatgctggaccgtctaccacggggccggaacgaggaccatcgcatccccaagggtcctgttatccagatgtacaccaatgtagataaagatctcgtgggttggcccgctcctcaaggttcccgttctttggcaccctgcacctgcggctcctcggacctttatctggtcacgaggcacgccgatgtcttcccgtgcgccggcggggtgatagcaggggcagcctgctttcgccccggcccatttcctacttgaaaggctcctcggggggtccgctgttgtgccccgcggggcacgccgtgggcattttcagggcgcggtgtgcacccgtggagtggctaaggcagtggactttatccctgtagagaacctagagacaaccatgaggtccccggtgttcacggacaactcctctccaccagcagtaccccagagcttccaggtggcccacctgcatctcccacaggcagcggcaagagcaccaaggtcccagctgcatacgcagctcagggctataaggtgctagtgctcaacccctctgttgctgcaacactaggcttcggtgcttatatgtccaaggcccagggatcgaccctaacatcaggaccggggtgagaacaattaccactggcagccccatcacgtactccacctacggcaagttccttgccgacggcgggtgctcagggggtgcttatgacataataatctgtgacgagtgccacccacggatgccacgtccatcttaggcatcggcaccgtccttgaccaagcagagaccgcaggggcgaggcttgttgtgctcgccaccgctacccctccgggctccatcactgtgccccatcctaacatgaggaggttgctctgtccaccaccggagagatccccttttatggcaaggctatccccctcgaagtaatcaagagggggaggcatctcatcttctgtcattcaaagaagaagtgtgacgagctcgctgcaaagctggttgcatgggcgtcaatgccgtggcctattaccgcggtcttgacgtgtctgtcatcccgaccagcggcgatgttgtcgtcgtggcaactgatgctctcatgaccggctataccggcgacttcgactcggtgatgactgcaacacgtgtgtcacccagacagtcgatttcagccttgaccccaccttcaccattgagacaaccacgcttccccaggatgctgtctcccgtacacaacggcggggcaggactggcagggggaagccaggcacctacggtttgtggcaccgggggagcgcccctctggcatgttcgactcgtctgtcctctgtgagtgctatgacgcgggctgtgcttggtatgagctcacgcccgccgagaccacagttaggctacgagcgtaatgaacaccccggggcttcccgtgtgccaggaccaccttgaattttgggagggcgtctttacgggccttacccatatagatgcccacttcctatcccagacaaagcagagtggggagaaccttccttacctggtagcgtacaagccaccgtgtgcgctagggctcaagcccctcccccgtcgtgggaccagatgtggaagtgtttagtccgcctcaagcccaccctccatgggccaacacccctgctatacagattgggcgctgttcaaatgaagtcaccctgacacacccaatcacaaaatacatcatgacatgtatgtcggctga

SEQ ID NO: 257 - DNA, 4869 bp, Hepatitis C virus; identical to SEQ ID NO: 194

SEQ ID NO: 258 - DNA, 4869 bp, Hepatitis C virus; identical to SEQ ID NO: 194

SEQ ID NO: 259 - DNA, 4869 bp, Hepatitis C virus
tcgcccacaggacgtcaagttcccgggtggcggtcagatcgttggtggagtttacttgttgccgcgcaggggccctagattgggtgtgcgcgcgacgaggaagacttccgagcggtcgcaacctcgagcagacgtcagcctatccccaaggcacgtcggcccgagggcaggacctgggctcagcccgggtacccctggcccctctatggcaatgagggctgtgggtgggcgggatggctcctgtctccccgtggtctcggcctagctggggcccctcagacccccggcgtaggtcgcgtaatttgggtaaagtcatcgatacccttacatgcggcttcgccgacctcatggggtacataccgctcgtcggcgcccctcttgggggcgctgccaggccctggcgcatggcgtccgggttctggaagacggcgtgaactatgcaacagggaaccttcctggttgctctttctctatcttcctcctggctttgctctcttgcctgactgtgcctgcttcagcctacaagtgcgcaactccacggggctttatcatgtcaccaatgattgccctaactcgagtattgtgtacgaggcggccgatgctatcctgcacactccggggtgtgtcccttgcgtctacgagggtaacgcctcgaggtgttggtggcgataacccccacggtggccaccagggacggcaaactccccacagtgcagcttcgacgtcacatcgatctgcttgtcgggagcgccaccctttgttcggccctttacgtgggggacctgtgcggtctgtctttcttgtcggccaactgttcaccttctctcccaggctccactggacaacgcaggactgcaattgttccatctaccccggccatataacgggtcaccgtatggcatgggacatgatgatgaactggtcccctacgcggcgctggtagtagctcagatgctccggatcccgcaagccatcttggacatgatcgctggtgctcactggggagtcctagcgggcatagcgtatttctccatggtggggaactgggcgaaggtcctgtagtgctgctgctatttgccggcgtcgacgcggaaatccacgtcaccgggggagctgccggccgtaccatggctggatttactggtctctttacacgaggcgcccagcagagcatccagttggttaacaccaacggcagtggcacatcaacagaacggctttgaactgcaacgatagccttcagaccggctggatagcggggcttctctatcacaacaaattcaactcttcaggctgtccggagaggttggccagctgccgacccctaccgattttgcccagggctggggccctatcagttacgccaacggaagcggccccgaccaacgcccctactgctggcactaccccccaaggccttgcggcattgtgcccgcacagagcgtatgtggcccggtatattgcttcctcccagtcccgtggtggtgggaacgaccgacaggtcgggcgcgcctacctacggatggggtgcaaacgatacggacgtcttcgtccttaacaacactaggccaccactgggcaattggttcggttgacctggatgaactcaactggatacaccaaagtgtgcggggcgcccccctgtgtcatcagaggggtgggcaacaacaccttgcactgccccaccgattgtttccgcaagcatccggaagccacatactctcggtgcggctccgtccctggattacacccaggtgcctggtcaactacccgtataggctttggcattacccttgtaccatcaactacaccgtattcaaggtcaggatgtacgtgggaggggtcgagcataggctagaggcgcctgcaactggacgcggggcgaacgttgcagtctggaagacagggacaggtccgagctcagcccgttgctgctgtccaccacacagtggcaggtccttccctgttccttcacgaccctgccagccttgtccaccggcctctccacctccaccagaacattgtggacgtgcagtacttatacggggtggggtcaagtatcgcgtcctgggccatcaagtgggagtacgtcgttctcctattccttctgcttgcagacgcgcgcgtctgtcctgcttgtggatgatgttgctcatatcccaagcggaggcggccttggagaacctcgtagtgctcaatgcagcatctttggccgggacgcacggtcttgtgtccttcctcgtgttcttctgctttgcgtggtacctgaaggtaggtgggtgcccggagcggcctacgccctctacgggatgtggcctctcctcctgctcctgttggcgttgccccagcgggcatacgcgttggacacggaggtggccgcgtcgtgtggcggcgctgtcttgtcgggttgatggcgctgactctgtcaccacattacaagcgatatgtcagctggtgcttgtggtggcttcagtactttctgaccagagcagaagcgcaactgcacgtgtgggttccccccctcgacgtccgagggggggcgacgccgtcatcttactcgtgtgtgctgtacgcccgactttggtgtttgacatcaccaagctgctgctggccgtcttcgggcccctttggattctccaagccagtttgcttaaagtaccctacttgtgcgcgttcaaggccttctccggatctgcgcgctagcgcggaagatggcggggggtcattacgtgcaaatggtcatcatcaagctaggggcgctcactggcacctatgtttacaaccacctcactcctcttcgggactggcgcacaacggcctgcgagatctggctgtggctgtagagccagtcgtcttctcccgaatggagaccaacctcatcacgtggggggcagacaccgccgcgtgcggtgacatcatcaacggcttgcccgttccgcccgtaggggccgggagatactgctcggaccagccgacggaatggtctccaaggggtggaggttgctggcacccatcacggcatacgcccagcagacaaggggcctcctagggtgtataatcaccagcctaaccggcgggacaaaaaccaggtggagggtgaggtccagattgtgtcaactgctgcccaaaccttcctggcaacgtgcatcaatggagtatgctggaccgtctaccacggggccgggacgaggaccatcgcatccccaagggtcctgtcatccagatgtacaccaatgtagacaaagatcttgtgggctggcccgctccccaaggttcccgttcattgacaccctgcacctgcggctcctcggacctttatctggtcacgaggcacgccgatgtcttcccgtgcgccggcggggtgatagcaggggcagcctgctttcgccccggcccatttcctacttgaaaggctcctcggggggcccgctgttgtgccccgcggggcatgctgtgggcatattcagggcgcagtgtgcacccgtggagtggctaaggcggtggactttatccctgtagagaacctagagacaaccatgaggtccccggtgttcacggacaactcctctccaccggcagtaccccagagcttccaggtggcccacctgcatctcccacaggcagcggcaagagcaccaaggtcccggctgcatacgcagctcagggctataaggtgctagtgctcaacccttctgttgctgcaacactaggcttcggtgtttatatgtccaaggcccagggatcgatcctaacatcaggaccggggtgagaacaattaccactggcagccccatcacgtactccacctacggcaagttccttgccgacggcgggtgctcagggggtgcttatgacataataatctgtgacgagtgccacccacggatgccacatctatcttaggcatcggcaccgtccttgaccaagcagagaccgcgggggcgaggcttgttgtgctcgccaccgctacccctccgggctctgtcaccgtgccccatcctaacatgaggaggttgctctgtccaccaccggagagatccctttttatggcaaggctatccccctcgaagtaatcaagggggggaggcatctcatcttctgtcattcaaagaagaagtgtgacgagctcgccgcaaagctggtcgcatgggcgtcaatgccgtggcctattaccgcggccttgacgtgtctgtcatcccgaccagcggcgatgttgtcgtcgtggcaactgatgctctcatgaccggctataccggcgacttcgactcggtgatgactgcaacacgtgtgtcacccagacagttgatttcagccttgaccccaccttcaccattgagacaaccacgcttccccaggatgctgtctcccgtacacaacgtcggggcaggactggcagggggaagccaggcacctacgatttgtggcaccgggggagcgcccctccggcatgttcgactcgtctgtcctctgtgagtgctatgacgcgggctgtgcttggtatgagctcacgcccgccgagactacagttaggctacgagcgtaatgaacaccccggggcttcccgtgtgccaggaccaccttgaattttgggagggcgtctttacgggccttactcatatagatgcccacttcctatcccagacaaagcagagtggggagaaccttccttacctggtagcgtacaagccaccgtgtgcgctagggctcaagcccctcccccatcgtgggaccagatgtggaagtgcttggtccgcctcaagcccaccctccatgggccaacacccctgctatacagattgggcgctgttcaaatgaagtcaccctgacacacccaatcacaaaatacatcatgacatgtatgtcggctga

SEQ ID NO: 260 - DNA, 4869 bp, Hepatitis C virus; identical to SEQ ID NO: 194

SEQ ID NO: 261 - DNA, 4869 bp, Hepatitis C virus; identical to SEQ ID NO: 194

SEQ ID NO: 262 - DNA, 4869 bp, Hepatitis C virus; identical to SEQ ID NO: 194

SEQ ID NO: 263 - DNA, 4869 bp, Hepatitis C virus; identical to SEQ ID NO: 194

SEQ ID NO: 264 - DNA, 4869 bp, Hepatitis C virus; identical to SEQ ID NO: 194

SEQ ID NO: 265 - DNA, 4869 bp, Hepatitis C virus; identical to SEQ ID NO: 194

SEQ ID NO: 266 - DNA, 4869 bp, Hepatitis C virus
tcgcccacaggacgtcaagttcccgggtggcggtcagatcgttggtggagtttacttgttgccgcgcaggggccctagattgggtgtgcgtgcgacgaggaagacttccgagcggtcgcaacctcgagtagacgtcagcctatccccaaggcacgtcggcccgagggcaggacctgggctcagcccgggtacccctggcccctctatggcaatgagggctgcgggtgggcgggatggctcctgtctccccgtggtctcggcctaactggggccccacagacccccggcgtaggtcgcgtaatttgggtaaggtcatcgatacccttacatgcggcttcgccgacctcatggggtacataccgctcgtcggcgcccctcttgggggcgctgccaggccctggcgcatggcgtccgggttctggaagacggcgtgaactatgcaacagggaaccttcctggttgctctttctctatcttccttctggctttgctctcttgcctgactgtgcctgcttcagcctacaagtgcgcaactccacggggctttatcatgtcaccaatgattgccctaactcgagtattgtgtacgaggcggacgatgctatcctgcacactccggggtgtgtcccttgcgtccgcgagggtaacggctcgaggtgttggtggcgataacccccacggtggccaccagggacggcaaactccccacagtgcagcttcgacgtcacatcgatctgctcgtcgggagcgctaccctttgttcggccctttacgtgggggacctgtgcggtctgtctttcttgtcggccaactgttcaccttctctcccaggcgccactggacaacgcaggactgcaattgttccatctatcccggccatataacgggtcaccgtatggcatgggacatgatgatgaactggtcccctacgcggcgctggtagtagctcagatgctccggatcccacaagccatcctggacatgatcgctggtgctcactggggagtcctggcgggcatagcgtatttctccatggtggggaactgggcgaaggtcctgtagtgctgctgctatttgccggcgtcgacgcgggaacccacgtcaccgggggcattgccgcccgtaccacgtctagaattgctggtctcttcaacccaggcgcccagcaggacatccagctggttaacaccaacggcagtggcacatcaacagaacggccttgaactgtaacgatagccttcacaccggctggatagcggggcttttctatcgctacaaattcaactcttcaggctgtcccgagaggttggccagctgccgacccctaccgattttgcccagggctggggccctattagttacgccaacggaagcggccccgaccaacgcccctactgctggcactatcccccaaagccttgcggcattgtgcccgcacagagcgtgtgtggcccggtgtattgcttcctcccagccccgtggtggtgggaacgaccgacaaggcgggcgcgcctacctacagatggggtgcaaacgatacggacgtcttcgtccttaacaacaccaggccaccactgggcaattggttcggttgacctggatgaactcaactggatacaccaaagtgtgcggggcgcccccctgcgtcatcggaggggtgggcaacaagaccttgcactgccccaccgattgtttccgcaagcatccggaagccacatactctcggtgcggctccgtccctggattacacccaggtgtctggtcgactatccgtataggctttggcattacccttgtaccatcaactacaccgtgttcaaagtcaggatgtacgtgggaggggtcgagcataggctggaggcgcctgcaactggacgcggggcgaacgttgcaatctggaagacagggacaggtccgagctcagcccgttgctgctgtccaccacacagtggcaagtccttccgtgttccttcacgaccctgccagccttgtccaccggcctctccacctccaccagaacattgtggacgtgcagtacttatacggggtggggtcaagcatcgcgtcctgggccatcaagtgggagtacgtcgttctcctattccttctgctcgcagacgcgcgcgtctgtcctgcttgtggatgatgttactcatatcccaagcggaggcggctttggagaacctcgtagtgctcaatgcagcatctttggccgggacacacggtcttgtgtccctcctcgtgttcttctgctttgcgtggtacctgaaggtaggtgggtgcccggagcggtctacgccctctacgggatgtggcctctcctcctgctcctattggcgttgccccagcgggcatatgcgttggacacggaggtggccgcgtcgtgtggcggcgctgtcttgtcgggttgatggcgctgactctgtcaccatattacaagcgctatgtcagctggtgcttatggtggcttcagtactttctgaccagagcagaagcgcaactgcacgtgtgggttccccctctcgacgtccgagggggggcgacgccgtcatcttactcatgtgtgctgtacgcccggctttggtgtttgacatcaccaagctgctgctggccgtcctcggacccctctggattctccaagccagtttgcttaaagtgccctacttgtgcgcgttcaaggccttctccggatctgcgcgctagcgcggaagatggcggggggtcattacgtgcaaatggtcatcatcaagttgggggcgctcactggcacttatgtgtataaccatctcactcctcttcgggactggcgcacaacggcctgcgagatctggctgtggctgtagagccagtcgtcttctcccgaatggagaccaacctcatcacgtggggggcagacaccgccgcatgcggcgacatcatcaacggcttgcccgttccgcccgcaggggccgggagatactgctcggaccagccgacggaatggtctccaaggggtggaggttgctggcacccatcacggcatacgcccagcagacaaggggcctcctagggtgtataatcaccagcctaaccggcgggacaaaaatcaggtggagggtgaggtccagattgtgtcaactgctgcccaaacctttctggcaacgtgcatcaatggagtatgctggaccgtctaccacggggccggaacgaggaccatcgcatccccaagggtcctgttatccagatgtacaccaatgtagataaagatctcgtgggttggcccgctcctcaaggttcccgttctttggcaccctgcacctgcggctcctcggacctttatctggtcacgaggcacgccgatgtcttcccgtgcgccggcggggtgatagcaggggcagcctgctttcgccccggcccatttcctacttgaaaggctcctcggggggtccgctgttgtgccccgcggggcacgccgtgggcattttcagggcgcggtgtgcacccgtggagtggctaaggcagtggactttatccctgtagagaacctagagacaaccatgaggtccccggtgttcacggacaactcctctccaccagcagtaccccagagcttccaggtggcccacctgcatctcccacaggcagcggcaagagcaccaaggtcccagctgcatacgcagctcagggctataaggtgctagtgctcaacccctctgttgctgcaacactaggcttcggtgcttatatgtccaaggcccagggatcgaccctaacatcaggaccggggtgagaacaattaccactggcagccccatcacgtactccacctacggcaagttccttgccgacggcgggtgctcagggggtgcttatgacataataatctgtgacgagtgccacccacggatgccacgtccatcttaggcatcggcaccgtccttgaccaagcagagaccgcaggggcgaggcttgttgtgctcgccaccgctacccctccgggctccatcactgtgccccatcctaacatgaggaggttgctctgtccaccaccggagagatccccttttatggcaaggctatccccctcgaagtaatcaagggggggaggcatctcatcttctgtcattcaaagaagaagtgtgacgagctcgctgcaaagctggttgcatgggcgtcaatgccgtggcctattaccgcggtcttgacgtgtctgtcatcccgaccagcggcgatgttgtcgtcgtggcaactgatgctctcatgaccggctataccggcgacttcgactcggtgatgactgcaacacgtgtgtcacccagacagtcgatttcagccttgaccccaccttcaccattgagacaaccacgcttccccaggatgctgtctcccgtacacaacggcggggcaggactggcagggggaagccaggcacctacggtttgtggcaccgggggagcgcccctctggcatgttcgactcgtctgtcctctgtgagtgctatgacgcgggctgtgcttggtatgagctcacgcccgccgagaccacagttaggctacgagcgtaatgaacaccccggggcttcccgtgtgccaggaccaccttgaattttgggagggcgtctttacgggccttacccatatagatgcccacttcctatcccagacaaagcagagtggggagaaccttccttacctggtagcgtacaagccaccgtgtgcgctagggctcaagcccctcccccgtcgtgggaccagatgtggaagtgtttagtccgcctcaagcccaccctccatgggccaacacccctgctatacagattgggcgctgttcaaatgaagtcaccctgacacacccaatcacaaaatacatcatgacatgtatgtcggctga

SEQ ID NO: 267 - DNA, 4869 bp, Hepatitis C virus; identical to SEQ ID NO: 194

SEQ ID NO: 268 - DNA, 4869 bp, Hepatitis C virus; identical to SEQ ID NO: 245

SEQ ID NO: 269 - DNA, 4869 bp, Hepatitis C virus; identical to SEQ ID NO: 194

SEQ ID NO: 270 - DNA, 4869 bp, Hepatitis C virus; identical to SEQ ID NO: 209

SEQ ID NO: 271 - DNA, 4869 bp, Hepatitis C virus; identical to SEQ ID NO: 194

SEQ ID NO: 272 - DNA, 4869 bp, Hepatitis C virus
tcgcccacaggacgtcaagttcccgggtggcggtcagatcgttggtggagtttacttgttgccgcgcaggggccctagattgggtgtgcgcgcgacgaggaagacttccgagcggtcgcaacctcgagtagacgtcagcctatccccaaggcacgtcggcccgagggcaggacctgggctcagcccgggtacccctggcccctctatggcaatgagggctgcgggtgggcgggatggctcctgtctccccgtggtctcggcctaactggggccccacagacccccggcgtaggtcgcgtaatttgggtaaggtcatcgatacccttacatgcggcttcgccgacctcatggggtacataccgctcgtcggcgcccctcttgggggcgctgccaggccctggcgcatggcgtccgggttctggaagacggcgtgaactatgcaacagggaaccttcctggttgctctttctctatcttccttctggctttgctctcttgcctgactgtgcctgcttcagcctacaagtgcgcaactccacggggctttatcatgtcaccaatgattgccctaactcgagtattgtgtacgaggcggacgatgctatcctgcacactccggggtgtgtcccttgcgtccgcgagggtaacggctcgaggtgttggtggcgataacccccacggtggccaccagggacggcaaactccccacagtgcagcttcgacgtcacatcgatctgctcgtcgggagcgctaccctttgttcggccctttacgtgggggacctgtgcggtctgtctttcttgtcggccaactgttcaccttctctcccaggcgccactggacaacgcaggactgcaattgttccatctatcccggccatataacgggtcaccgtatggcatgggacatgatgatgaactggtcccctacgcggcgctggtagtagctcagatgctccggatcccacaagccatcctggacatgatcgctggtgctcactggggagtcctggcgggcatagcgtatttctccatggtggggaactgggcgaaggtcctgtagtgctgctgctatttgccggcgtcgacgcgggaacccacgtcaccgggggcattgccgcccgtaccacgtctagaattgctggtctcttcaacccaggcgcccagcaggacatccagctggttaacaccaacggcagtggcacatcaacagaacggccttgaactgtaacgatagccttcacaccggctggatagcggggcttttctatcgctacaaattcaactcttcaggctgtcccgagaggttggccagctgccgacccctaccgattttgcccagggctggggccctattagttacgccaacggaagcggccccgaccaacgcccctactgctggcactatcccccaaagccttgcggcattgtgcccgcacagagcgtgtgtggcccggtgtattgcttcctcccagccccgtggtggtgggaacgaccgacaaggcgggcgcgcctacctacagatggggtgcaaacgatacggacgtcttcgtccttaacaacaccaggccaccactgggcaattggttcggttgacctggatgaactcaactggatacaccaaagtgtgcggggcgcccccctgcgtcatcggaggggtgggcaacaagaccttgcactgccccaccgattgtttccgcaagcatccggaagccacatactctcggtgcggctccgtccctggattacacccaggtgtctggtcgactatccgtataggctttggcattacccttgtaccatcaactacaccgtgttcaaagtcaggatgtacgtgggaggggtcgagcataggctggaggcgcctgcaactggacgcggggcgaacgttgcaatctggaagacagggacaggtccgagctcagcccgttgctgctgtccaccacacagtggcaagtccttccgtgttccttcacgaccctgccagccttgtccaccggcctctccacctccaccagaacattgtggacgtgcagtacttatacggggtggggtcaagcatcgcgtcctgggccatcaagtgggagtacgtcgttctcctattccttctgctcgcagacgcgcgcgtctgtcctgcttgtggatgatgttactcatatcccaagcggaggcggctttggagaacctcgtagtgctcaatgcagcatctttggccgggacacacggtcttgtgtccctcctcgtgttcttctgctttgcgtggtacctgaaggtaggtgggtgcccggagcggtctacgccctctacgggatgtggcctctcctcctgctcctattggcgttgccccagcgggcatatgcgttggacacggaggtggccgcgtcgtgtggcggcgctgtcttgtcgggttgatggcgctgactctgtcaccatattacaagcgctatgtcagctggtgcttatggtggcttcagtactttctgaccagagcagaagcgcaactgcacgtgtgggttccccctctcgacgtccgagggggggcgacgccgtcatcttactcatgtgtgctgtacgcccggctttggtgtttgacatcaccaagctgctgctggccgtcctcggacccctctggattctccaagccaggttgcttaaagtgccctacttgtgcgcgttcaaggccttctccggatctgcgcgctagcgcggaagatggcggggggtcattacgtgcaaatggtcatcatcaagttgggggcgctcactggcacttatgtgtataaccatctcactcctcttcgggactggcgcacaacggcctgcgagatctggctgtggctgtagagccagtcgtcttctcccgaatggagaccaacctcatcacgtggggggcagacaccgccgcatgcggcgacatcatcaacggcttgcccgttccgcccgcaggggccgggagatactgctcggaccagccgacggaatggtctccaaggggtggaggttgctggcacccatcacggcatacgcccagcagacaaggggcctcctagggtgtataatcaccagcctaaccggcgggacaaaaatcaggtggagggtgaggtccagattgtgtcaactgctgcccaaacctttctggcaacgtgcatcaatggagtatgctggaccgtctaccacggggccggaacgaggaccatcgcatccccaagggtcctgttatccagatgtacaccaatgtagataaagatctcgtgggttggcccgctcctcaaggttcccgttctttggcaccctgcacctgcggctcctcggacctttatctggtcacgaggcacgccgatgtcttcccgtgcgccggcggggtgatagcaggggcagcctgctttcgccccggcccatttcctacttgaaaggctcctcggggggtccgctgttgtgccccgcggggcacgccgtgggcattttcagggcgcggtgtgcacccgtggagtggctaaggcagtggactttatccctgtagagaacctagagacaaccatgaggtccccggtgttcacggacaactcctctccaccagcagtaccccagagcttccaggtggcccacctgcatctcccacaggcagcggcaagagcaccaaggtcccagctgcatacgcagctcagggctataaggtgctagtgctcaacccctctgttgctgcaacactaggcttcggtgcttatatgtccaaggcccagggatcgaccctaacatcaggaccggggtgagaacaattaccactggcagccccatcacgtactccacctacggcaagttccttgccgacggcgggtgctcagggggtgcttatgacataataatctgtgacgagtgccacccacggatgccacgtccatcttaggcatcggcaccgtccttgaccaagcagagaccgcaggggcgaggcttgttgtgctcgccaccgctacccctccgggctccatcactgtgccccatcctaacatgaggaggttgctctgtccaccaccggagagatccccttttatggcaaggctatccccctcgaagtaatcaagggggggaggcatctcatcttctgtcattcaaagaagaagtgtgacgagctcgctgcaaagctggttgcatgggcgtcaatgccgtggcctattaccgcggtcttgacgtgtctgtcatcccgaccagcggcgatgttgtcgtcgtggcaactgatgctctcatgaccggctataccggcgacttcgactcggtgatgactgcaacacgtgtgtcacccagacagtcgatttcagccttgaccccaccttcaccattgagacaaccacgcttccccaggatgctgtctcccgtacacaacggcggggcaggactggcagggggaagccaggcacctacggtttgtggcaccgggggagcgcccctctggcatgttcgactcgtctgtcctctgtgagtgctatgacgcgggctgtgcttggtatgagctcacgcccgccgagaccacagttaggctacgagcgtaatgaacaccccggggcttcccgtgtgccaggaccaccttgaattttgggagggcgtctttacgggccttacccatatagatgcccacttcctatcccagacaaagcagagtggggagaaccttccttacctggtagcgtacaagccaccgtgtgcgctagggctcaagcccctcccccgtcgtgggaccagatgtggaagtgtttagtccgcctcaagcccaccctccatgggccaacacccctgctatacagattgggcgctgttcaaatgaagtcaccctgacacacccaatcacaaaatacatcatgacatgtatgtcggctga

SEQ ID NO: 273 - DNA, 4869 bp, Hepatitis C virus; identical to SEQ ID NO: 239

SEQ ID NO: 274 - DNA, 4869 bp, Hepatitis C virus; identical to SEQ ID NO: 209

SEQ ID NO: 275 - DNA, 4869 bp, Hepatitis C virus
tcgcccacaggacgtcaagttcccgggtggcggtcagatcgttggtggagtttacttgttgccgcgcaggggccctagattgggtgtgcgcgcgacgaggaagacttccgagcggtcgcaacctcgagtagacgtcagcctatccccaaggcacgtcggcccgagggcaggacctgggctcagcccgggtacccctggcccctctatggcaatgagggctgcgggtgggcgggatggctcctgtctccccgtggtctcggcctaactggggccccacagacccccggcgtaggtcgcgtaatttgggtaaggtcatcgatacccttacatgcggcttcgccgacctcatggggtacataccgctcgtcggcgcccctcttgggggcgctgccaggccctggcgcatggcgtccgggttctggaagacggcgtgaactatgcaacagggaaccttcctggttgctctttctctatcttccttctggctttgctctcttgcctgactgtgcctgcttcagcctacaagtgcgcaactccacggggctttatcatgtcaccaatgattgccctaactcgagtattgtgtacgaggcggacgatgctatcctgcacactccggggtgtgtcccttgcgtccgcgagggtaacggctcgaggtgttggtggcgataacccccacggtggccaccagggacggcaaactccccacagtgcagcttcgacgtcacatcgatctgctcgtcgggagcgctaccctttgttcggccctttacgtgggggacctgtgcggtctgtctttcttgtcggccaactgttcaccttctctcccaggcgccactggacaacgcaggactgcaattgttccatctatcccggccatataacgggtcaccgtatggcatgggacatgatgatgaactggtcccctacgcggcgctggtagtagctcagatgctccggatcccacaagccatcctggacatgatcgctggtgctcactggggagtcctggcgggcatagcgtatttctccatggtggggaactgggcgaaggtcctgtagtgctgctgctatttgccggcgtcgacgcgggaacccacgtcaccgggggcattgccgcccgtaccacgtctagaattgctggtctcttcaacccaggcgcccagcaggacatccagctggttaacaccaacggcagtggcacatcaacagaacggccttgaactgtaacgatagccttcacaccggctggatagcggggcttttctatcgctacaaattcaactcttcaggctgtcccgagaggttggccagctgccgacccctaccgattttgcccagggctggggccctattagttacgccaacggaagcggccccgaccaacgcccctactgctggcactatcccccaaagccttgcggcattgtgcccgcacagagcgtgtgtggcccggtgtattgcttcctcccagccccgtggtggtgggaacgaccgacaaggcgggcgcgcctacctacagatggggtgcaaacgatacggacgtcttcgtccttaacaacaccaggccaccactgggcaattggttcggttgacctggatgaactcaactggatacaccaaagtgtgcggggcgcccccctgcgttatcggaggggtgggcaacaagaccttgcactgccccaccgattgtttccgcaagcatccggaagctacatactctcggtgcggctccgtccctggattacacccaggtgtctggtcgactatccgtataggctttggcattacccttgtaccatcaactacaccgtgttcaaagtcaggatgtacgtgggaggggtcgagcataggctggaggcgcctgcaactggacgcggggcgaacgttgcaatctggaagacagggacaggtccgagctcagcccgttgctgctgtccaccacacagtggcaagtccttccgtgttccttcacgaccctgccagccttgtccaccggcctctccacctccaccagaacattgtggacgtgcagtacttatacggggtggggtcaagcatcgcgtcctgggccatcaagtgggagtacgtcgttctcctattccttctgctcgcagacgcgcgcgtctgtcctgcttgtggatgatgttactcatatcccaagcggaggcggctttggagaacctcgtagtgctcaatgcagcatctttggccgggacacacggtcttgtgtccctcctcgtgttcttctgctttgcgtggtacctgaaggtaggtgggtgcccggagcggtctacgccctctacgggatgtggcctctcctcctgctcctattggcgttgccccagcgggcatatgcgttggacacggaggtggccgcgtcgtgtggcggcgctgtcttgtcgggttgatggcgctgactctgtcaccatattacaagcgctatgtcagctggtgcttatggtggcttcagtactttctgaccagagcagaagcgcaactgcacgtgtgggttccccctctcgacgtccgagggggggcgacgccgtcatcttactcatgtgtgctgtacgcccggctttggtgtttgacatcaccaagctgctgctggccgtcctcggacccctctggattctccaagccagtttgcttaaagtgccctacttgtgcgcgttcaaggccttctccggatctgcgcgctagcgcggaagatggcggggggtcattacgtgcaaatggtcatcatcaagttgggggcgctcactggcacttatgtgtataaccatctcactcctcttcgggactggcgcacaacggcctgcgagatctggctgtggctgtagagccagtcgtcttctcccgaatggagaccaacctcatcacgtggggggcagacaccgccgcatgcggcgacatcatcaacggcttgcccgttccgcccgcaggggccgggagatactgctcggaccagccgacggaatggtctccaaggggtggaggttgctggcacccatcacggcatacgcccagcagacaaggggcctcctagggtgtataatcaccagcctaaccggcgggacaaaaatcaggtggagggtgaggtccagattgtgtcaactgctgcccaaacctttctggcaacgtgcatcaatggagtatgctggaccgtctaccacggggccggaacgaggaccatcgcatccccaagggtcctgttatccagatgtacaccaatgtagataaagatctcgtgggttggcccgctcctcaaggttcccgttctttggcaccctgcacctgcggctcctcggacctttatctggtcacgaggcacgccgatgtcttcccgtgcgccggcggggtgatagcaggggcagcctgctttcgccccggcccatttcctacttgaaaggctcctcggggggtccgctgttgtgccccgcggggcacgccgtgggcattttcagggcgcggtgtgcacccgtggagtggctaaggcagtggactttatccctgtagagaacctagagacaaccatgaggtccccggtgttcacggacaactcctctccaccagcagtaccccagagcttccaggtggcccacctgcatctcccacaggcagcggcaagagcaccaaggtcccagctgcatacgcagctcagggctataaggtgctagtgctcaacccctctgttgctgcaacactaggcttcggtgcttatatgtccaaggcccagggatcgaccctaacatcaggaccggggtgagaacaattaccactggcagccccatcacgtactccacctacggcaagttccttgccgacggcgggtgctcagggggtgcttatgacataataatctgtgacgagtgccacccacggatgccacgtccatcttaggcatcggcaccgtccttgaccaagcagagaccgcaggggcgaggcttgttatgctcgccaccgctacccctccgggctccatcactgtgccccatcctaacatgaggaggttgctctgtccaccaccggagagatccccttttatggcaaggctatccccctcgaagtaatcaagggggggaggcatctcatcttctgtcattcaaagaagaagtgtgacgagctcgctgcaaagctggttgcatgggcgtcaatgccgtggcctattaccgcggtcttgacgtgtctgtcatcccgaccagcggcgatgttgtcgtcgtggcaactgatgctctcatgaccggctataccggcgacttcgactcggtgatgactgcaacacgtgtgtcacccagacagtcgatttcagccttgaccccaccttcaccattgagacaaccacgcttccccaggatgctgtctcccgtacacaacggcggggcaggactggcagggggaagccaggcacctacggtttgtggcaccgggggagcgcccctctggcatgttcgactcgtctgtcctctgtgagtgctatgacgcgggctgtgcttggtatgagctcacgcccgccgagaccacagttaggctacgagcgtaatgaacaccccggggcttcccgtgtgccaggaccaccttgaattttgggagggcgtctttacgggccttacccatatagatgcccacttcctatcccagacaaagcagagtggggagaaccttccttacctggtagcgtacaagccaccgtgtgcgctagggctcaagcccctcccccgtcgtgggaccagatgtggaagtgtttagtccgcctcaagcccaccctccatgggccaacacccctgctatacagattgggcgctgttcaaatgaagtcaccctgacacacccaatcacaaaatacatcatgacatgtatgtcggctga

SEQ ID NO: 276 - DNA, 4869 bp, Hepatitis C virus
tcgcccacaggacgtcaagttcccgggtggcggtcagatcgttggtggagtttacttgttgccgcgcaggggccctagattgggtgtgcgcgcgacgaggaagacttccgagcggtcgcaacctcgagtagacgtcagcctatccccaaggcacgtcggcccgagggcaggacctgggctcagcccgggtacccctggcccctctatggcaatgagggctgcgggtgggcgggatggctcctgtctccccgtggtctcggcctaactggggccccacagacccccggcgtaggtcgcgtaatttgggtaaggtcatcgatacccttacatgcggcttcgccgacctcatggggtacataccgctcgtcggcgcccctcttgggggcgctgccaggccctggcgcatggcgtccgggttctggaagacggcgtgaactatgcaacagggaaccttcctggttgctctttctctatcttccttctggctttgctctcttgcctgactgtgcctgcttcagcctacaagtgcgcaactccacggggctttatcatgtcaccaatgattgccctaactcgagtattgtgtacgaggcggacgatgctatcctgcacactccggggtgtgtcccttgcgtccgcgagggtaacggctcgaggtgttggtggcgataacccccacggtggccaccagggacggcaaactccccacagtgcagcttcgacgtcacatcgatctgctcgtcgggagcgctaccctttgttcggccctttacgtgggggacctgtgcggtctgtctttcttgtcggccaactgttcaccttctctcccaggcgccactggacaacgcaggactgcaattgttccatctatcccggccatataacgggtcaccgtatggcatgggacatgatgatgaactggtcccctacgcggcgctggtagtagctcagatgctccggatcccacaagccatcctggacatgatcgctggtgctcactggggagtcctggcgggcatagcgtatttctccatggtggggaactgggcgaaggtcctgtagtgctgctgctatttgccggcgtcgacgcgggaacccacgtcaccgggggcattgccgcccgtaccacgtctagaattgctggtctcttcaacccaggcgcccagcaggacatccagctggttaacaccaacggcagtggcacatcaacagaacggccttgaactgtaacgatagccttcacaccggctggatagcggggcttttctatcgctacaaattcaactcttcaggctgtcccgagaggttggccagctgccgacccctaccgattttgcccagggctggggccctattagttacgccaacggaagcggccccgaccaacgcccctactgctggcactatcccccaaagccttgcggcattgtgcccgcacagagcgtgtgtggcccggtgtattgcttcctcccagccccgtggtggtgggaacgaccgacaaggcgggcgcgcctacctacagatggggtgcaaacgatacggacgtcttcgtccttaacaacaccaggccaccactgggcaattggttcggttgacctggatgaactcaactggatacaccaaagtgtgcggggcgcccccctgcgtcatcggaggggtgggcaacaagaccttgcactgccccaccgattgtttccgcaagcatccggaagccacatactctcggtgcggctccgtccctggattacacccaggtgtctggtcgactatccgtataggctttggcattacccttgtaccatcaactacaccgtgttcaaagtcaggatgtacgtgggaggggtcgagcataggctggaggcgcctgcaactggacgcggggcgaacgttgcaatctggaagacagggacaggtccgagctcagcccgttgctgctgtccaccacacagtggcaagtccttccgtgttccttcacgaccctgccagccttgtccaccggcctctccacctccaccagaacattgtggacgtgcagtacttatacggggtggggtcaagcatcgcgtcctgggccatcaagtgggagtacgtcgttctcctattccttctgctcgcagacgcgcgcgtctgtcctgcttgtggatgatgttactcatatcccaagcggaggcggctttggagaacctcgtagtgctcaatgcagcgtctttggccgggacacacggtcttgtgtccctcctcgtgttcttctgctttgcgtggtacctgaaggtaggtgggtgcccggagcggtctacgccctctacgggatgtggcctctcctcctgctcctattggcgttgccccagcgggcatatgcgttggacacggaggtggccgcgtcgtgtggcggcgctgtcttgtcgggttgatggcgctgactctgtcaccatattacaagcgctatgtcagctggtgcttatggtggcttcagtactttctgaccagagcagaagcgcaactgcacgtgtgggttccccctctcgacgtccgagggggggcgacgccgtcatcttactcatgtgtgctgtacgcccggctttggtgtttgacatcaccaagctgctgctggccgtcctcggacccctctggattctccaagccagtttgcttaaagtgccctacttgtgcgcgttcaaggccttctccggatctgcgcgctagcgcggaagatggcggggggtcattacgtgcaaatggtcatcatcaagttgggggcgctcactggcacttatgtgtataaccatctcactcctcttcgggactggcgcacaacggcctgcgagatctggctgtggctgtagagccagtcgtcttctcccgaatggagaccaacctcatcacgtggggggcagacaccgccgcatgcggcgacatcatcaacggcttgcccgttccgcccgcaggggccgggagatactgctcggaccagccgacggaatggtctccaaggggtggaggttgctggcacccatcacggcatacgcccagcagacaaggggcctcctagggtgtataatcaccagcctaaccggcgggacaaaaatcaggtggagggtgaggtccagattgtgtcaactgctgcccaaacctttctggcaacgtgcatcaatggagtatgctggaccgtctaccacggggccggaacgaggaccatcgcatccccaagggtcctgttatccagatgtacaccaatgtagataaagatctcgtgggttggcccgctcctcaaggttcccgttctttggcaccctgcacctgcggctcctcggacctttatctggtcacgaggcacgccgatgtcttcccgtgcgccggcggggtgatagcaggggcagcctgctttcgccccggcccatttcctacttgaaaggctcctcggggggtccgctgttgtgccccgcggggcacgccgtgggcattttcagggcgcggtgtgcacccgtggagtggctaaggcagtggactttatccctgtagagaacctagagacaaccatgaggtccccggtgttcacggacaactcctctccaccagcagtaccccagagcttccaggtggcccacctgcatctcccacaggcagcggcaagagcaccaaggtcccagctgcatacgcagctcagggctataaggtgctagtgctcaacccctctgttgctgcaacactaggcttcggtgcttatatgtccaaggcccagggatcgaccctaacatcaggaccggggtgagaacaattaccactggcagccccatcacgtactccacctacggcaagttccttgccgacggcgggtgctcagggggtgcttatgacataataatctgtgacgagtgccacccacggatgccacgtccatcttaggcatcggcaccgtccttgaccaagcagagaccgcaggggcgaggcttgttgtgctcgccaccgctacccctccgggctccatcactgtgccccatcctaacatgaggaggttgctctgtccaccaccggagagatccccttttatggcaaggctatccccctcgaagtaatcaagggggggaggcatctcatcttctgtcattcaaagaagaagtgtgacgagctcgctgcaaagctggttgcatgggcgtcaatgccgtggcctattaccgcggtcttgacgtgtctgtcatcccgaccagcggcgatgttgtcgtcgtggcaactgatgctctcatgaccggctataccggcgacttcgactcggtgatgactgcaacacgtgtgtcacccagacagtcgatttcagccttgaccccaccttcaccattgagacaaccacgcttccccaggatgctgtctcccgtacacaacggcggggcaggactggcagggggaagccaggcacctacggtttgtggcaccgggggagcgcccctctggcatgttcgactcgtctgtcctctgtgagtgctatgacgcgggctgtgcttggtatgagctcacgcccgccgagaccacagttaggctacgagcgtaatgaacacccctgggcttcccgtgtgccaggaccaccttgaattttgggagggcgtctttacgggccttacccatatagatgcccacttcctatcccagacaaagcagagtggggagaaccttccttacctggtagcgtacaagccaccgtgtgcgctagggctcaagcccctcccccgtcgtgggaccagatgtggaagtgtttagtccgcctcaagcccaccctccatgggccaacacccctgctatacagattgggcgctgttcaaatgaagtcaccctgacacacccaatcacaaaatacatcatgacatgtatgtcggctga

SEQ ID NO: 277 - DNA, 4869 bp, Hepatitis C virus; identical to SEQ ID NO: 224

SEQ ID NO: 278 - DNA, 5221 bp, Hepatitis C virus
tcactcccctgtgaggaactactgtcttcacgcagaaagcgtctagccatggcgttagtatgagtgtcgtgcagcctccaggaccccccctcccgggagagccatagtggtctgcggaaccggtgagacaccggaattgccaggacgaccgggtcctttcttggataaacccgctcaatgcctggagatttgggcgtgcccccgcaagactgctagccgagtagtgttgggtcgcgaaaggccttgtggtactgctgatagggtgcttgcgagtgccccgggaggtctcgtagaccgtgcaccatgagcacgaatcctaaacctcaaagaaaaaccaaacgtaacaccaaccgtcgcccacaggacgtcaagttcccgggtggcggtcagatcgtggtggagtttacttgttgccgcgcaggggccctagattgggtgtgcgcgcgacgaggaagacttccgagcggtcgcaacctcgaggtagacgtcagcctatccccaaggcacgtcggcccgagggcagacctgggctcagcccgggtacccctggcccctctacggcaatgagggctgcgggtgggcgggatggctcctgtctccccgtggctctcggcctaactggggccccacagacccccggcgtaggtcgcgtaatttgggtaagtcatcgatacccttacatgcggcttcgccgacctcatggggtacataccgctcgtcggcgcccctcttgggggcgctgccagggccctggcgcatggcgtccgggttctggaagacggcgtgaacttgcaacagggaaccttcctggttgctctttctctatcttccttctggctttgctctcttgcctgactgtgcctgtttcagcctaccaagtgcgcaactccacggggctttatcatgtcaccaatgattgccctaattcgagattgtgtacgaggcggacgatgctatcctgcacactccggggtgtgtcccttgcgtccgcgagggtaacggctcgaggtgttgggtggcgataacccccacggtggccaccagggacggcaaactcccacagtgcagcttcgacgtcacatcgatctgcttgtcgggagcgctaccctttgttcggccctttacgtgggggacctgtgcgggtctgtctttcttgtcggccaactgttcaccttctctcccaggcgccactggacaaccaggactgcaattgttccatctatcccggccatataacgggtcaccgtatggcatgggacatgatgatgaactggtcccctacgacggcgctggtagtagctcagatgctccggatcccacaagccacctggacatgatcgctggtgctcactggggagtcctggcgggcatagcgtatttctccatggtggggaactgggcgaaggtcctggtagtgctgctgctatttgccggcgtcgacgcgggaacccacgtcaccgggggcatgccgcccgtaccacgtctagaattgctggtctcttcaacccaggcgcccagcaggacatccagctggttaacaccaacggcagttggcacatcaacagaacggccttgaactgtaacgatagccttccaccggctggatagcggggcttttctatcgctacaaattcaactcttcaggctgtcccgagaggttggccagctgccgaccccttaccgattttgcccagggctggggccctattagttacgccaacggaagcggccccgacaacgcccctactgctggcactatcccccaaagccttgcggcattgtgcccgcacagagcgtgtgtggcccggtgtattgcttcactcccagccccgtggtggtgggaacgaccgacaaggcgggcggcctacctacagatggggtgcaaacgatacggacgtcttcgtccttaacaacaccaggccaccactgggcaattggttcggttgcacctggatgaactcaactggatacaccaaagtgtgcggggcgcccccctgcgtcatggaggggtgggcaacaagaccttgcactgccccaccgattgtttccgcaagcatccggaagccacatactctcggtgcggctccggtccctggattacacccaggtgcctggtcgactatccgtatagctttggcattacccttgtaccatcaactacaccgtgttcaaagtcaggatgtacgtgggaggggtcgagcataggctagaggctgcctgcaactggacgcggggcgaacgttgcaatctggaagacagggacaggtccgactcagcccgttgctgctgtccaccacacagtggcaagtccttccgtgttccttcacgaccctgccagccttgtccaccggcctcatccacctccaccagaacattgtggacgtgcagtacttatacgggtggggtcaagcatcgcgtcctgggccatcaagtgggagtacgtcgttctcctattccttctgctcgcagacgcgcgcgtctgctcctgcttgtggatgatgttactcatatcccaagcggaggcggctttggagaacctgtagtgctcaatgcagcatctttggccgggacacacggtcttgtgtccctcctcgtgttcttctgctttgcgtggtacctgaagggtaggtgggtgcccggagcggtctacgccctctacgggatgtgcctctcctcctgctcctattggcgttgccccagcgggcatatgcgttggacacggaggtggccgcgtcgtgtggcggcgctgttcttgtcgggttgatggcgctgactctgtcaccatattacaagcgctatgtcagctgtgcttatggtggcttcagtactttctgaccagagcagaagcgcaactgcacgtgtgggttccccctctcgacgtccgaggggggcgcgacgccgtcatcttactcatgtgtgctgtacgcccgacttggtgtttgacatcaccaagctgctgctggccgtcctcggacccctctggattctccaagccagtttgcttaaagtgccctactttgtgcgcgttcaaggccttctccggatctgcgcgctagcgcggaagatggcggggggcattacgtgcaaatggtcatcatcaagttgggggcgctcactggcacttatgtgtataaccatctcactcctcttcgggactgggcgcacaacggcctgcgagatctggctgtggctgtagagccagcgtcttctcccgaatggagaccaacctcatcacgtggggggcagacaccgccgcatgcggcgacatcatcaacggcttgcccgtctccgcccgcaggggccgggagatactgctcggaccagccgacggaatggtctccaagggtggaggttgctggcacccatcacggcgtacgcccagcagacaaggggcctcctagggtgtataatcaccagcctaaccggccgggacaaaaatcaggtggagggtgaggtccagattgtgtcaatgctgcccaaacctttctggcaacgtgcatcaatggagtatgctggaccgtctaccacggggccggaacgaggaccatcgcatcacccaagggtccggttatccagatgtacaccaatgtagacaaagatcttgtgggttgcccgctcctcaaggttcccgttctttggcaccctgcacctgcggctcctcggacctttatctggtcacgaggcacgccgatgtcattcccgtgcgccggcggggtgatagcaggggcagcctgctttgccccggcccatttcctacttgaaaggctcctcggggggtccgctgttgtgccccgcggggcacgccgtgggcattttcagggccgcggtgtgcacccgtggagtggctaaggcagtggactttatccctgtagagaacctgagacaaccatgaggtccccggtgttcacggacaactcctctccaccagcagtaccccagagcttccaggtggcccacctgcatgctcccacaggcagcggcaagagcaccaaggtcccagctgcatcgcagctcagggctataaggtgctagtgctcaacccctctgttgctgcaacactaggcttcggtgcttatatgtccaaggcccatgggatcgaccctaacatcaggaccggggtgagaacaattaccactggcagccccatacgtactccacctacggcaagttccttgccgacggcgggtgctcagggggtgcttatgacataataatctgtgacgagtgccactccacggatgccacgtccatcttaggcatcggcaccgtccttgccaagcagagaccgcaggggcgaggcttgttgtgctcgccaccgctacccctccgggctccatcaccgtgccccatcctaacatcgaggaggttgctctgtccaccaccggagagatccccttttatggcaaggctatcccctcgaagtaatcaagggggggaggcatctcatcttctgtcattcaaagaagaagtgtgacgagctcgctgcaaagctggttgcattgggcgtcaatgccgtggcctattaccgcggtcttgacgtgttgtcatcccgaccagcggcgatgttgtcgtcgtggcaactgatgctctcatgaccggctataccggcgacttcgactcggtgatagactgcaacacgtgtgtcacccagacagtcgatttcagccttgaccccaccttcacattgagacaaccacgcttccccaggatgctgtctcccgtacacaacggcggggcaggactggcagggggaagccaggcacctacaggtttgtggcaccgggggagcgcccctctggcatgttcgactgtctgtcctctgtgagtgctatgacgcgggctgtgcttggtatgagctcacgcccgccgagaccacagttaggctacgagcgtacatgaacaccccggggcttcccgtgtgccaggaccaccttgaattttgggagggcgttttacgggccttacccatatagatgcccacttcctatcccagacaaagcagagtggggagaaccttccttacctggtagcgtaccaagccaccgtgtgcgctagggctcaagcccctcccccatcgtggaccagatgtggaagtgtttagtccgcctcaagcccaccctccatgggccaacacccctgctatacagattgggcgctgttcagaatgaagtcaccctgacacacccaatcacaaaatacatcatgacatgtatgtcggcga

SEQ ID NO: 279 - DNA, 5221 bp, Hepatitis C virus
tcactcccctgtgaggaactactgtcttcacgcagaaagcgtctagccatggcgttagtatgagtgtcgtgcagcctccaggaccccccctcccgggagagccatagtggtctgcggaaccggtgagacaccggaattgccaggacgaccgggtcctttcttggataaacccgctcaatgcctggagatttgggcgtgcccccgcaagactgctagccgagtagtgttgggtcgcgaaaggccttgtggtactgctgatagggtgcttgcgagtgccccgggaggtctcgtagaccgtgcaccatgagcacgaatcctaaacctcaaagaaaaaccaaacgtaacaccaaccgtcgcccacaggacgtcaagttcccgggtggcggtcagatcgtggtggagtttacttgttgccgcgcaggggccctagattgggtgtgcgcgcgacgaggaagacttccgagcggtcgcaacctcgaggtagacgtcagcctatccccaaggcacgtcggcccgagggcagacctgggctcagcccgggtacccctggcccctctatggcaatgagggctgcgggtgggcgggatggctcctgtctccccgtggctctcggcctaactggggccccacagacccccggcgtaggtcgcgtaatttgggtaagtcatcgatacccttacatgcggcttcgccgacctcatggggtacataccgctcgtcggcgcccctcttgggggcgctgccagggccctggcgcatggcgtccgggttctggaagacggcgtgaacttgcaacagggaaccttcctggttgctctttctctatcttccttctggctttgctctcttgcctgactgtgcctgcttcagcctaccaagtgcgcaactccacggggctttatcatgtcaccaatgattgccctaactcgagattgtgtacgaggcggacgatgctatcctgcacactccggggtgtgtcccttgcgtccgcgagggtaacggctcgaggtgttgggtggcgataacccccacggtggccaccagggacggcaaactcccacagtgcagcttcgacgtcacatcgatctgctcgtcgggagcgctaccctttgttcggccctttacgtgggggacctgtgcgggtctgtctttcttgtcggccaactgttcaccttctctcccaggcgccactggacaaccaggactgcaattgttccatctatcccggccatataacgggtcaccgtatggcatgggacatgatgatgaactggtcccctacgacggcgctggtagtagctcagatgctccggatcccacaagccacctggacatgatcgctggtgctcactggggagtcctggcgggcatagcgtatttctccatggtggggaactgggcgaaggtcctggtagtgctgctgctatttgccggcgtcgacgcgggaacccacgtcaccgggggcatgccgcccgtaccacgtctagaattgctggtctcttcaacccaggcgcccagcaggacatccagctggttaacaccaacggcagttggcacatcaacagaacggccttgaactgtaacgatagccttccaccggctggatagcggggcttttctatcgctacaaattcaactcttcaggctgtcccgagaggttggccagctgccgaccccttaccgattttgcccagggctggggccctattagttacgccaacggaagcggccccgacaacgcccctactgctggcactatcccccaaagccttgcggcattgtgcccgcacagagcgtgtgtggcccggtgtattgcttcactcccagccccgtggtggtgggaacgaccgacaaggcgggcggcctacctacagatggggtgcaaacgatacggacgtcttcgtccttaacaacaccaggccaccactgggcaattggttcggttgcacctggatgaactcaactggatacaccaaagtgtgcggggcgcccccctgcgtcatggaggggtgggcaacaagaccttgcactgccccaccgattgtttccgcaagcatccggaagccacatactctcggtgcggctccggtccctggattacacccaggtgtctggtcgactatccgtatagctttggcattacccttgtaccatcaactacaccgtgttcaaagtcaggatgtacgtgggaggggtcgagcataggctggaggctgcctgcaactggacgcggggcgaacgttgcaatctggaagacagggacaggtccgactcagcccgttgctgctgtccaccacacagtggcaagtccttccgtgttccttcacgaccctgccagccttgtccaccggcctcatccacctccaccagaacattgtggacgtgcagtacttatacgggtggggtcaagcatcgcgtcctgggccatcaagtgggagtacgtcgttctcctattccttctgctcgcagacgcgcgcgtctgctcctgcttgtggatgatgttactcatatcccaagcggaggcggctttggagaacctgtagtgctcaatgcagcatctttggccgggacacacggtcttgtgtccctcctcgtgttcttctgctttgcgtggtacctgaagggtaggtgggtgcccggagcggtctacgccctctacgggatgtgcctctcctcctgctcctattggcgttgccccagcgggcatatgcgttggacacggaggtggccgcgtcgtgtggcggcgctgttcttgtcgggttgatggcgctgactctgtcaccatattacaagcgctatgtcagctgtgcttatggtggcttcagtactttctgaccagagcagaagcgcaactgcacgtgtgggttccccctctcgacgtccgaggggggcgcgacgccgtcatcttactcatgtgtgctgtacgcccggcttggtgtttgacatcaccaagctgctgctggccgtcctcggacccctctggattctccaagccagtttgcttaaaatgccctactttgtgcgcgttcaaggccttctccggatctgcgcgctagcgcggaagatggcggggggcattacgtgcaaatggtcatcatcaagttgggggcgctcactggcacttatgtgtataaccatctcactcctcttcgggactgggcgcacaacggcctgcgagatctggctgtggctgtagagccagcgtcttctcccgaatggagaccaacctcatcacgtggggggcagacaccgccgcatgcggcgacatcatcaacggcttgcccgtctccgcccgcaggggccgggagatactgctcggaccagccgacggaatggtctccaagggtggaggttgctggcacccatcacggcatacgcccagcagacaaggggcctcctagggtgtataatcaccagcctaaccggccgggacaaaaatcaggtggagggtgaggtccagattgtgtcaatgctgcccaaacctttctggcaacgtgcatcaatggagtatgctggaccgtctaccacggggccggaacgaggaccatcgcatcacccaagggtcctgttatccagatgtacaccaatgtagataaagatctcgtgggttgcccgctcctcaaggttcccgttctttggcaccctgcacctgcggctcctcggacctttatctggtcacgaggcacgccgatgtcattcccgtgcgccggcggggtgatagcaggggcagcctgctttgccccggcccatttcctacttgaaaggctcctcggggggtccgctgttgtgccccgcggggcacgccgtgggcattttcagggccgcggtgtgcacccgtggagtggctaaggcagtggactttatccctgtagagaacctgagacaaccatgaggtccccggtgttcacggacaactcctctccaccagcagtaccccagagcttccaggtggcccacctgcatgctcccacaggcagcggcaagagcaccaaggtcccagctgcatcgcagctcagggctataaggtgctagtgctcaacccctctgttgctgcaacactaggcttcggtgcttatatgtccaaggcccatgggatcgaccctaacatcaggaccggggtgagaacaattaccactggcagccccatacgtactccacctacggcaagttccttgccgacggcgggtgctcagggggtgcttatgacataataatctgtgacgagtgccactccacggatgccacgtccatcttaggcatcggcaccgtccttgccaagcagagaccgcaggggcgaggcttgttgtgctcgccaccgctacccctccgggctccatcactgtgccccatcctaacatcgaggaggttgctctgtccaccaccggagagatccccttttatggcaaggctatcccctcgaagtaatcaagggggggaggcatctcatcttctgtcattcaaagaagaagtgtgacgagctcgctgcaaagctggttgcattgggcgtcaatgccgtggcctattaccgcggtcttgacgtgttgtcatcccgaccagcggcgatgttgtcgtcgtggcaactgatgctctcatgaccggctataccggcgacttcgactcggtgatagactgcaacacgtgtgtcacccagacagtcgatttcagccttgaccccaccttcacattgagacaaccacgcttccccaggatgctgtctcccgtacacaacggcggggcaggactggcagggggaagccaggcacctacaggtttgtggcaccgggggagcgcccctctggcatgttcgactgtctgtcctctgtgagtgctatgacgcgggctgtgcttggtatgagctcacgcccgccgagaccacagttaggctacgagcgtacatgaacaccccggggcttcccgtgtgccaggaccaccttgaattttgggagggcgttttacgggccttacccatatagatgcccacttcctatcccagacaaagcagagtggggagaaccttccttacctggtagcgtaccaagccaccgtgtgcgctagggctcaagcccctcccccgtcgtggaccagatgtggaagtgtttagtccgcctcaagcccaccctccatgggccaacacccctgctatacagattgggcgctgttcagaatgaagtcaccctgacacacccaatcacaaaatacatcatgacatgtatgtcggcga

SEQ ID NO: 280 - DNA, 5221 bp, Hepatitis C virus
tcactcccctgtgaggaactactgtcttcacgcagaaagcgcctagccatggcgttagtatgagtgtcgtgcagcctccaggaccccccctcccgggagagccatagtggtctgcggaaccggtgagacaccggaattgccaggacgaccgggtcctttcttggataaacccgctcaatgcctggagatttgggcgtgcccccgcaagaccgctagccgagtagtgttgggtcgcgaaaggccttgtggtactgctgatagggtgcttgcgagtgccccgggaggtctcgtagaccgtgcaccatgagcacgaatcctaaacctcaaagaaaaaccaaacgtaacaccaaccgtcgcccacaggacgtcaagttcccgggtggcggtcagatcgtggtggagtttacttgttgccgcgcaggggccctagattgggtgtgcgcgcgacgaggaagacttccgagcggtcgcaacctcgaggcagacgtcagcctatccccaaggcacgtcggcccgagggcagacctgggctcagcccgggtacccctggcccctctatggcaatgagggctgtgggtgggcgggatggctcctgtctccccgtggctctcggcctagctggggcccctcagacccccggcgtaggtcgcgtaatttgggtaagtcatcgatacccttacatgcggcttcgccgacctcatggggtacataccgctcgtcggcgcccctcttgggggcgctgccagggccctggcgcatggcgtccgggttctggaagacggcgtgaacttgcaacagggaaccttcctggttgctctttctctatcttcctcctggctttgctctcttgcctgactgtgcctgcttcagcctaccaagtgcgcaactccacggggctttatcatgtcaccaatgattgccctaactcgagattgtgtacgaggcggccgatgctatcctgcacactccggggtgtgtcccttgcgtctacgagggtaacgcctcgaggtgttgggtggcgataacccccacggtggccaccagggacggcaaactcccacagtgcagcttcgacgtcacatcgatctgcttgtcgggagcgccaccctttgttcggccctttacgtgggggacctgtgcgggtctgtctttcttgtcggccaactgttcaccttctctcccaggctccactggacaaccaggactgcaattgttccatctaccccggccatataacgggtcaccgtatggcatgggacatgatgatgaactggtcccctacgacggcgctggtagtagctcagatgctccggatcccgcaagccacttggacatgatcgctggtgctcactggggagtcctagcgggcatagcgtatttctccatggtggggaactgggcgaaggtcctagtagtgctgctgctatttgccggcgtcgacgcggaaacccacgtcaccgggggagcgccggccgtaccatggctggatttactggtctctttacacgaggcgcccagcagagcatccagttggttaacaccaacggcagttggcacatcaacagaacggctttgaactgcaacgatagccttcgaccggctggatagcggggcttctctatcacaacaaattcaactcttcaggctgtccggagaggttggccagctgccgaccccttaccgattttgcccagggctggggccctatcagttacgccaacggaagcggccccgacaacgcccctactgctggcactaccccccaaggccttgcggcattgtgcccgcacagagcgtatgtggcccggtatattgcttcactcccagtcccgtggtggtgggaacgaccgacaggtcgggcggcctacctacggatggggtgcaaacgatacggacgtcttcgtccttaacaacactaggccaccactgggcaattggttcggttgcacctggatgaactcaactggatacaccaaagtgtgcggggcgcccccctgtgtcatagaggggtgggcaacaacaccttgcactgccccaccgattgtttccgcaagcatccggaagccacatactctcggtgcggctccggtccctggattacacccaggtgcctggtcaactacccgtatagctttggcattacccttgtaccatcaactacaccgtattcaaggtcaggatgtacgtgggaggggtcgagcataggctagaggctgcctgcaactggacgcggggcgaacgttgcagtctggaagacagggacaggtccgactcagcccgttgctgctgtccaccacacagtggcaggtccttccctgttccttcacgaccctgccagccttgtccaccggcctcatccacctccaccagaacattgtggacgtgcagtacttatacgggtggggtcaagtatcgcgtcctgggccatcaagtgggagtacgtcgttctcctattccttctgcttgcagacgcgcgcgtctgctcctgcttgtggatgatgttgctcatatcccaagcggaggcggccttggagaacctgtagtgctcaatgcagcatctttggccgggacgcacggtcttgtgtccttcctcgtgttcttctgctttgcgtggtacctgaagggtaggtgggtgcccggagcggcctacgccctctacgggatgtgcctctcctcctgctcctgttggcgttgccccagcgggcatacgcgttggacacggaggtggccgcgtcgtgtggcggcgctgttcttgtcgggttgatggcgctgactctgtcaccacattacaagcgatatgtcagctgtgcttgtggtggcttcagtactttctgaccagagcagaagcgcaactgcacgtgtgggttccccccctcgacgtccgaggggggcgcgacgccgtcatcttactcgtgtgtgctgtacgcccgacttggtgtttgacatcaccaagctgctgctggccgtcttcgggcccctttggattctccaagccagtttgcttaaagtaccctactttgtgcgcgttcaaggccttctccggatctgcgcgctagcgcggaagatggcggggggcattacgtgcaaatggtcatcatcaagctaggggcgctcactggcacctatgtttacaaccacctcactcctcttcgggactgggcgcacaacggcctgcgagatctggctgtggctgtagagccagcgtcttctcccgaatggagaccaacctcatcacgtggggggcagacaccgccgcgtgcggtgacatcatcaacggcttgcccgtctccgcccgtaggggccgggagatactgctcggaccagccgacggaatggtctccaagggtggaggttgctggcacccatcacggcatacgcccagcagacaaggggcctcctagggtgtataatcaccagcctaaccggccgggacaaaaaccaggtggagggtgaggtccagattgtgtcaatgctgcccaaaccttcctggcaacgtgcatcaatggagtatgctggaccgtctaccacggggccgggacgaggaccatcgcatcacccaagggtcctgtcatccagatgtacaccaatgtagacaaagatcttgtgggctgcccgctccccaaggttcccgttcattgacaccctgcacctgcggctcctcggacctttatctggtcacgaggcacgccgatgtcattcccgtgcgccggcggggtgatagcaggggcagcctgctttgccccggcccatttcctacttgaaaggctcctcggggggcccgctgttgtgccccgcggggcatgctgtgggcatattcagggccgcagtgtgcacccgtggagtggctaaggcggtggactttatccctgtagagaacctgagacaaccatgaggtccccggtgttcacggacaactcctctccaccggcagtaccccagagcttccaggtggcccacctgcatgctcccacaggcagcggcaagagcaccaaggtcccggctgcatcgcagctcagggctataaggtgctagtgctcaacccttctgttgctgcaacactaggcttcggtgtttatatgtccaaggcccatgggatcgatcctaacatcaggaccggggtgagaacaattaccactggcagccccatacgtactccacctacggcaagttccttgccgacggcgggtgctcagggggtgcttatgacataataatctgtgacgagtgccactccacggatgccacatctatcttaggcatcggcaccgtccttgccaagcagagaccgcgggggcgaggcttgttgtgctcgccaccgctacccctccgggctctgtcaccgtgccccatcctaacatcgaggaggttgctctgtccaccaccggagagatccctttttatggcaaggctatcccctcgaagtaatcaagggggggaggcatctcatcttctgtcattcaaagaagaagtgtgacgagctcgccgcaaagctggtcgcattgggcgtcaatgccgtggcctattaccgcggccttgacgtgttgtcatcccgaccagcggcgatgttgtcgtcgtggcaactgatgctctcatgaccggctataccggcgacttcgactcggtgatagactgcaacacgtgtgtcacccagacagttgatttcagccttgaccccaccttcacattgagacaaccacgcttccccaggatgctgtctcccgtacacaacgtcggggcaggactggcagggggaagccaggcacctacagatttgtggcaccgggggagcgcccctccggcatgttcgactgtctgtcctctgtgagtgctatgacgcgggctgtgcttggtatgagctcacgcccgccgagactacagttaggctacgagcgtacatgaacaccccggggcttcccgtgtgccaggaccaccttgaattttgggagggcgttttacgggccttactcatatagatgcccacttcctatcccagacaaagcagagtggggagaaccttccttacctggtagcgtaccaagccaccgtgtgcgctagggctcaagcccctcccccatcgtggaccagatgtggaagtgcttggtccgcctcaagcccaccctccatgggccaacacccctgctatacagattgggcgctgttcagaatgaagtcaccctgacacacccaatcacaaaatacatcatgacatgtatgtcggcga

SEQ ID NO: 281 - DNA, 4869 bp, Hepatitis C virus
tcgcccacaggacgtcaagttcccgggtggcggtcagatcgttggtggagtttacttgttgccgcgcaggggccctagattgggtgtgcgcgcgacgaggaagacttccgagcggtcgcaacctcgagcagacgtcagcctatccccaaggcacgtcggcccgagggcaggacctgggctcagcccgggtacccctggcccctctatggcaatgagggctgtgggtgggcgggatggctcctgtctccccgtggtctcggcctagctggggcccctcagacccccggcgtaggtcgcgtaatttgggtaaagtcatcgatacccttacatgcggcttcgccgacctcatggggtacataccgctcgtcggcgctcctcttgggggcgctgccaggccctggcgcatggcgtccgggttctggaagacggcgtgaactatgcaacagggaaccttcctggttgctctttctctatcttcctcctggctttgctctcttgcctgactgtgcctgcttcagcctacaagtgcgcaactccacggggctttatcatgtcaccaatgattgccctaactcgagtattgtgtacgaggcggccgatgctatcctgcacactccggggtgtgtcccttgcgtctacgagggtaacgcctcgaggtgttggtggcgataacccccacggtggccaccagggatggcaaactccccacagtccagcttcgacgtcacatcgatctgcttgtcgggagcgctaccctttgttcggccctttacgtgggggacctgtgcggtctgtttttcttgtcggccaactgttcaccttctctcccaggctccactggacaacgcaggactgcaattgttccatctaccccggccatataacgggtcaccgtatggcatgggacatgatgatgaactggtcccctacgcggcgctggtagtagctcagatgctccggatcccgcaagccatcttggacatgatcgctggtgctcactggggagtcctagcgggcatagcgtatttctccatggtggggaactgggcgaaggtcctgtagtgctgctgctatttgccggcgtcgacgcggaaacccacgtcaccgggggagctgccggccgtaccatggctggatttactggtctctttacacaaggcgccaagcagagcatccagttggttaacaccaacggcagtggcacatcaacagaacggctttgaactgcaacgatagccttcagaccggctggatagcggggcttctctatcacaacaaattcaactcttcaggctgtcccgagaggttggccagctgccgacccctaccgattttgcccagggctggggccctatcagttacgccaacggaagcggccccgaccaacgcccctactgctggcactaccccccaaagccttgcggcattgtgcccgcacagagcgtatgtggcccggtatattgtttcctcctagccccgtggtggtgggaacgaccgacaggtcgggcgcgcctacctacggatggggtgcaaacgatacggacgtcttcgtccttaacaacaccaggccaccactgggcaattggttcggttgacctggatgaactcaactggatacaccaaagtgtgcggggcgcccccctgtgccatcagaggggtgggcaacaacaccttgcactgccccaccgattgtttccgcaagcatccggaagccacatactctcggtgcggctccgtccctggattacacccaggtgcctggtcaactacccgtataggctttggcattacccttgtaccatcaactacaccgtgttcaaggtcaggatgtacgtgggaggggtcgagcataggctagaggcgcctgcaactggacgcggggcgaacgttgcagtctggaagacagggacaggtccgagctcagcccgttgctgctgtccaccacacagtggcaggtccttccctgttccttcacgaccctgccagccttgtccaccggcctctccacctccaccagaacattgtggacgtgcagtacttatacggggtggggtcaagtatcgcgtcctgggccatcaagtgggagtacgtcgttctcctattccttctgcttgcagacgcgcgcgtctgtcctgcttgtggatgatgttactcatatcccaagcggaggcggccttggagaacctcgtagtgctcaatgcagcatctttggccgggacgcatggtcttgtgtccttcctcgtgttcttctgctttgcgtggtacttgaaggtaggtgggtgcccggagcggcctacgccctctacgggatgtggcctctcctcctgctcctgttggcgttgccccagcgggcatacgcgttggacacggaggtggccgcgtcgtgtggcggcgctgtcttgtcgggttgatggcgctgactctgtcaccacattacaagcgatatgtcagctggtgcttgtggtggcttcagtactttctgaccagagcagaagcgcaactgcacgtgtgggttccccccctcgacgtccgagggggggcgacgccgtcatcttactcatgtgtgctgtacgcccgactttggtgtttgacatcaccaagttgctgctggccgtcttcgggcccctttggattctccaagccagtttgcttaaagtaccctacttgtgcgcgttcaaggccttctccggatctgcgcgctagcgcggaagatggcggggggtcattacgtgcaaatggtcatcatcaaactaggggcgctcactggcacctatgtttataaccacctcactcctcttcgggactggcgcacaacggcctgcgagatctggctgtggctgtagagccagtcgtcttctcccgaatggagaccaacctcatcacgtggggggcagacaccgccgcgtgcggtgacatcatcaacggcttgcccgttccgcccgtaggggccgggagatactgctcggaccagccgacggaatggtctccaaggggtggaggttgctggcacccatcacggcatacgcccagcagacaaggggcctcctagggtgtataatcaccagcctaaccggcgggacaaaaaccaggtggagggtgaggtccagattgtgtcaactgctgcccaaactttcctggcaacgtgcatcaatggagtatgctggaccgtctaccacggggccgggacgaggaccatcgcatccccaagggtcctgtcatccagatgtacaccaatgtagacaaagatcttgtgggctggcccgctccccaaggttcccgttcattgacaccctgcacctgcggctcctcggacctttatctggtcacgaggcacgccgatgtcttcccgtgcgccggcggggtgatagcaggggcagcctgctttcgccccggcccatttcctacttgaaaggctcctcggggggtccgctgttgtgccccgcggggcatgctgtgggcatattcagggcgcagtgtgcacccgtggagtggctaaggcggtggactttatccctgtagagaacctagagacaaccatgaggtccccggtgttcacggacaactcctctccaccggcagtaccccagagcttccaggtggcccacctgcatctcccacaggcagcggcaagagcaccaaggtcccggctgcatacgcagctcagggctataaggtgctagtgctcaacccctctgttgctgcaacactgggcttcggtgtttatatgtccaaggcccagggatcgatcctaacatcaggaccggggtgagaacaattaccactggcagccccatcacgtactccacctacggcaagttccttgccgacggcgggtgctcagggggtgcttatgacataataatctgtgacgagtgccacccacggatgccacatctatcttaggcatcggcaccgtccttgaccaagcagagaccgcgggggcgaggcttgttgtgctcgccaccgctacccctccgggctccgtcaccgtgccccatcctaacatgaggaggttgctctgtccaccaccggagagatccctttttatggcaaggctatccccctcgaagtaatcaagggggggaggcatctcatcttctgtcattcaaagaagaagtgtgacgagctcgccgcaaagctggttgcatgggcgtcaatgccgtggcctattaccgcggccttgacgtgtctgtcatcccgaccagcggcgatgttgtcgtcgtggcaactgatgctctcatgaccggctataccggcgacttcgactcggtgatgactgcaatacgtgtgtcacccagacagttgatttcagccttgaccccaccttcaccattgagacaaccacgcttccccaggatgctgtctcccgtacacaacgtcggggcaggactggcagggggaagccaggcacctacgatttgtggcaccgggggagcgcccctccggcatgttcgactcgtctgtcctctgtgagtgctatgacgcgggctgtgcttggtatgagctcacgcccgccgagactacagttaggctacgagcgtaatgaacaccccggggcttcccgtgtgccaggaccaccttgaattttgggagggcgtctttacgggccttactcatatagatgcccacttcctatcccagacaaagcagagtggggagaacctcccttacctagtagcgtacaagccaccgtgtgcgctagggctcaagcccctcccccatcgtgggaccagatgtggaagtgcttggtccgcctcaagcccaccctccatgggccaacacccctgctatacagattgggcgctgttcaaatgaagtcaccctgacacacccaatcacaaaatacatcatgacatgtatgtcggctga

SEQ ID NO: 282 - DNA, 4869 bp, Hepatitis C virus; identical to SEQ ID NO: 194

SEQ ID NO: 283 - DNA, 4869 bp, Hepatitis C virus; identical to SEQ ID NO: 194

SEQ ID NO: 284 - DNA, 4869 bp, Hepatitis C virus
tcgcccacaggacgtcaagttcccgggtggcggtcagatcgttggtggagtttacttgttgccgcgcaggggccctagattgggtgtgcgcgcgacgaggaagacttccgagcggtcgcaacctcgagtagacgtcagcctatccccaaggcacgtcggcccgagggcaggacctgggctcagcccgggtacccctggcccctctatggcaatgagggctgcgggtgggcgggatggctcctgtctccccgtggtctcggcctaactggggccccacagacccccggcgtaggtcgcgtaatttgggtaaggtcatcgatacccttacatgcggcttcgccgacctcatggggtacataccgctcgtcggcgcccctcttgggggcgctgccaggccctggcgcatggcgtccgggttctggaagacggcgtgaactatgcaacagggaaccttcctggttgctctttctctatcttccttctggctttgctctcttgcctgactgtgcctgcttcagcctacaagtgcgcaactccacggggctttatcatgtcaccaatgattgccctaactcgagtattgtgtacgaggcggacgatgctatcctgcacactccggggtgtgtcccttgcgtccgcgagggtaacggctcgaggtgttggtggcgataacccccacggtggccaccagggacggcaaactccccacagtgcagcttcgacgtcacatcgatctgctcgtcgggagcgctaccctttgttcggccctttacgtgggggacctgtgcggtctgtctttcttgtcggccaactgttcaccttctctcccaggcgccactggacaacgcaggactgcaattgttccatctatcccggccatataacgggtcaccgtatggcatgggacatgatgatgaactggtcccctacgcggcgctggtagtagctcagatgctccggatcccacaagccatcctggacatgatcgctggtgctcactggggagtcctggcgggcatagcgtatttctccatggtggggaactgggcgaaggtcctgtagtgctgctgctatttgccggcgtcgacgcgggaacccacgtcaccgggggcattgccgcccgtaccacgtctagaattgctggtctcttcaacccaggcgcccagcaggacatccagctggttaacaccaacggcagtggcacatcaacagaacggccttgaactgtaacgatagccttcacaccggctggatagcggggcttttctatcgctacaaattcaactcttcaggctgtcccgagaggttggccagctgccgacccctaccgattttgcccagggctggggccctattagttacgccaacggaagcggccccgaccaacgcccctactgctggcactatcccccaaagccttgcggcattgtgcccgcacagagcgtgtgtggcccggtgtattgcttcctcccagccccgtggtggtgggaacgaccgacaaggcgggcgcgcctacctacagatggggtgcaaacgatacggacgtcttcgtccttaacaacaccaggccaccactgggcaattggttcggttgacctggatgaactcaactggatacaccaaagtgtgcggggcgcccccctgcgtcatcggaggggtgggcaacaagaccttgcactgccccaccgattgtttccgcaagcatccggaagccacatactctcggtgcggctccgtccctggattacacccaggtgtctggtcgactatccgtataggctttggcattacccttgtaccatcaactacaccgtgttcaaagtcaggatgtacgtgggaggggtcgagcataggctggaggcgcctgcaactggacgcggggcgaacgttgcaatctggaagacagggacaggtccgagctcagcccgttgctgctgtccaccacacagtggcaagtccttccgtgttccttcacgaccctgccagccttgtccaccggcctctccacctccaccagaacattgtggacgtgcagtacttatacggggtggggtcaagcatcgcgtcctgggccatcaagtgggagtacgtcgttctcctattccttctgctcgcagacgcgcgcgtctgtcctgcttgtggatgatgttactcatatcccaagcggaggcggctttggagaacctcgtagtgctcaatgcagcatctttggccgggacacacggtcttgtgtccctcctcgtgttcttctgctttgcgtggtacctgaaggtaggtgggtgcccggagcggtctacgccctctacgggatgtggcctctcctcctgctcctattggcgttgccccagcgggcatatgcgttggacacggaggtggccgcgtcgtgtggcggcgctgtcttgtcgggttgatggcgctgactctgtcaccatattacaagcgctatgtcagctggtgcttatggtggcttcagtactttctgaccagagcagaagcgcaactgcacgtgtgggttccccctctcgacgtccgagggggggcgacgccgtcatcttactcatgtgtgctgtacgcccggctttggtgtttgacatcaccaagctgctgctggccgtcctcggacccctctggattctccaagccagtttgcttaaagtgccctacttgtgcgcgttcaaggccttctccagatctgcgcgctagcgcggaagatggcggggggtcattacgtgcaaatggtcatcatcaagttgggggcgctcactggcacttatgtgtataaccatctcactcctcttcgggactggcgcacaacggcctgcgagatctggctgtggctgtagagccagtcgtcttctcccgaatggagaccaacctcatcacgtggggggcagacaccgccgcatgcggcgacatcatcaacggcttgcccgttccgcccgcaggggccgggagatactgctcggaccagccgacggaatggtctccaaggggtggaggttgctggcacccatcacggcatacgcccagcagacaaggggcctcctagggtgtataatcaccagcctaaccggcgggacaaaaatcaggtggagggtgaggtccagattgtgtcaactgctgcccaaacctttctggcaacgtgcatcaatggagtatgctggaccgtctaccacggggccggaacgaggaccatcgcatccccaagggtcctgttatccagatgtacaccaatgtagataaagatctcgtgggttggcccgctcctcaaggttcccgttctttggcaccctgcacctgcggctcctcggacctttatctggtcacgaggcacgccgatgtcttcccgtgcgccggcggggtgatagcaggggcagcctgctttcgccccggcccatttcctacttgaaaggctcctcggggggtccgctgttgtgccccgcggggcacgccgtgggcattttcagggcgcggtgtgcacccgtggagtggctaaggcagtggactttatccctgtagagaacctagagacaaccatgaggtccccggtgttcacggacaactcctctccaccagcagtaccccagagcttccaggtggcccacctgcatctcccacaggcagcggcaagagcaccaaggtcccagctgcatacgcagctcagggctataaggtgctagtgctcaacccctctgttgctgcaacactaggcttcggtgcttatatgtccaaggcccagggatcgaccctaacatcaggaccggggtgagagcaattaccactggcagccccatcacgtactccacctacggcaagttccttgccgacggcgggtgctcagggggtgcttatgacataataatctgtgacgagtgccacccacggatgccacgtccatcttaggcatcggcaccgtccttgaccaagcagagaccgcaggggcgaggcttgttgtgctcgccaccgctacccctccgggctccatcactgtgccccatcctaacatgaggaggttgctctgtccaccaccggagagatccccttttatggcaaggctatccccctcgaagtaatcaagggggggaggcatctcatcttctgtcattcaaagaagaagtgtgacgagctcgctgcaaagctggttgcatgggcgtcaatgccgtggcctattaccgcggtcttgacgtgtctgtcatcccgaccagcggcgatgttgtcgtcgtggcaactgatgctctcatgaccggctataccggcgacttcgactcggtgatgactgcaacacgtgtgtcacccagacagtcgatttcagccttgaccccaccttcaccattgagacaaccacgcttccccaggatgctgtctcccgtacacaacggcggggcaggactggcagggggaagccaggcacctacggtttgtggcaccgggggagcgcccctctggcatgttcgactcgtctgtcctctgtgagtgctatgacgcgggctgtgcttggtatgagctcacgcccgccgagaccacagttaggctacgagcgtaatgaacaccccggggcttcccgtgtgccaggaccaccttgaattttgggagggcgtctttacgggccttacccatatagatgcccacttcctatcccagacaaagcagagtggggagaaccttccttacctggtagcgtacaagccaccgtgtgcgctagggctcaagcccctcccccgtcgtgggaccagatgtggaagtgtttagtccgcctcaagcccaccctccatgggccaacacccctgctatacagattgggcgctgttcaaatgaagtcaccctgacacacccaatcacaaaatacatcatgacatgtatgtcggctga

SEQ ID NO: 285 - DNA, 5221 bp, Hepatitis C virus
tcactcccctgtgaggaactactgtcttcacgcagaaagcgtctagccatggcgttagtatgagtgtcgtgcagcctccaggaccccccctcccgggagagccatagtggtctgcggaaccggtgagacaccggaattgccaggacgaccgggtcctttcttggataaacccgctcaatgcctggagatttgggcgtgcccccgcaagactgctagccgagtagtgttgggtcgcgaaaggccttgtggtactgctgatagggtgcttgcgagtgccccgggaggtctcgtagaccgtgcaccatgagcacgaatcctaaacctcaaagaaaaaccaaacgtaacaccaaccgtcgcccacaggacgtcaagttcccgggtggcggtcagatcgtggtggagtttacttgttgccgcgcaggggccctagattgggtgtgcgcgcgacgaggaagacttccgagcggtcgcaacctcgaggtagacgtcagcctatccccaaggcacgtcggcccgagggcagacctgggctcagcccgggtacccctggcccctctatggcaatgagggctgcgggtgggcgggatggctcctgtctccccgtggctctcggcctaactggggccccacagacccccggcgtaggtcgcgtaatttgggtaagtcatcgatacccttacatgcggcttcgccgacctcatggggtacataccgctcgtcggcgcccctcttgggggcgctgccagggccctggcgcatggcgtccgggttctggaagacggcgtgaacttgcaacagggaaccttcctggttgctctttctctatcttccttctggctttgctctcttgcctgactgtgcctgcttcagcctaccaagtgcgcaactccacggggctttatcatgtcaccaatgattgccctaactcgagattgtgtacgaggcggacgatgctatcctgcacactccggggtgtgtcccttgcgtccgcgagggtaacggctcgaggtgttgggtggcgataacccccacggtggccaccagggacggcaaactcccacagtgcagcttcgacgtcacatcgatctgctcgtcgggagcgctaccctttgttcggccctttacgtgggggacctgtgcgggtctgtctttcttgtcggccaactgttcaccttctctcccaggcgccactggacaaccaggactgcaattgttccatctatcccggccatataacgggtcaccgtatggcatgggacatgatgatgaactggtcccctacgacggcgctggtagtagctcagatgctccggatcccacaagccacctggacatgatcgctggtgctcactggggagtcctggcgggcatagcgtatttctccatggtggggaactgggcgaaggtcctggtagtgctgctgctatttgccggcgtcgacgcgggaacccacgtcaccgggggcatgccgcccgtaccacgtctagaattgctggtctcttcaacccaggcgcccagcaggacatccagctggttaacaccaacggcagttggcacatcaacagaacggccttgaactgtaacgatagccttccaccggctggatagcggggcttttctatcgctacaaattcaactcttcaggctgtcccgagaggttggccagctgccgaccccttaccgattttgcccagggctggggccctattagttacgccaacggaagcggccccgacaacgcccctactgctggcactatcccccaaagccttgcggcattgtgcccgcacagagcgtgtgtggcccggtgtattgcttcactcccagccccgtggtggtgggaacgaccgacaaggcgggcggcctacctacagatggggtgcaaacgatacggacgtcttcgtccttaacaacaccaggccaccactgggcaattggttcggttgcacctggatgaactcaactggatacaccaaagtgtgcggggcgcccccctgcgtcatggaggggtgggcaacaagaccttgcactgccccaccgattgtttccgcaagcatccggaagccacatactctcggtgcggctccggtccctggattacacccaggtgtctggtcgactatccgtatagctttggcattacccttgtaccatcaactacaccgtgttcaaagtcaggatgtacgtgggaggggtcgagcataggctggaggctgcctgcaactggacgcggggcgaacgttgcaatctggaagacagggacaggtccgactcagcccgttgctgctgtccaccacacagtggcaagtccttccgtgttccttcacgaccctgccagccttgtccaccggcctcatccacctccaccagaacattgtggacgtgcagtacttatacgggtggggtcaagcatcgcgtcctgggccatcaagtgggagtacgtcgttctcctattccttctgctcgcagacgcgcgcgtctgctcctgcttgtggatgatgttactcatatcccaagcggaggcggctttggagaacctgtagtgctcaatgcagcatctttggccgggacacacggtcttgtgtccctcctcgtgttcttctgctttgcgtggtacctgaagggtaggtgggtgcccggagcggtctacgccctctacgggatgtgcctctcctcctgctcctattggcgttgccccagcgggcatatgcgttggacacggaggtggccgcgtcgtgtggcggcgctgttcttgtcgggttgatggcgctgactctgtcaccatattacaagcgctatgtcagctgtgcttatggtggcttcagtactttctgaccagagcagaagcgcaactgcacgtgtgggttccccctctcgacgtccgaggggggcgcgacgccgtcatcttactcatgtgtgctgtacgcccggcttggtgtttgacatcaccaagctgctgctggccgtcctcggacccctctggattctccaagccagtttgcttaaagtgccctactttgtgcgcgttcaaggccttctccggatctgcgcgctagcgcggaagatggcggggggcattacgtgcaaatggtcatcatcaagttgggggcgctcactggcacttatgtgtataaccatctcactcctcttcgggactgggcgcacaacggcctgcgagatctggctgtggctgtagagccagcgtcttctcccgaatggagaccaacctcatcacgtggggggcagacaccgccgcatgcggcgacatcatcaacggcttgcccgtctccgcccgcaggggccgggagatactgctcggaccagccgacggaatggtctccaagggtggaggttgctggcacccatcacggcatacgcccagcagacaaggggcctcctagggtgtataatcaccagcctaaccggccgggacaaaaatcaggtggagggtgaggtccagattgtgtcaatgctgcccaaacctttctggcaacgtgcatcaatggagtatgctggaccgtctaccacggggccggaacgaggaccatcgcatcacccaagggtcctgttatccagatgtacaccaatgtagataaagatctcgtgggttgcccgctcctcaaggttcccgttctttggcaccctgcacctgcggctcctcggacctttatctggtcacgaggcacgccgatgtcattcccgtgcgccggcggggtgatggcaggggcagcctgctttgccccggcccatttcctacttgaaaggctcctcggggggtccgctgttgtgccccgcggggcacgccgtgggcattttcagggccgcggtgtgcacccgtggagtggctaaggcagtggactttatccctgtagagaacctgagacaaccatgaggtccccggtgttcacggacaactcctctccaccagcagtaccccagagcttccaggtggcccacctgcatgctcccacaggcagcggcaagagcaccaaggtcccagctgcatcgcagctcagggctataaggtgctagtgctcaacccctctgttgctgcaacactaggcttcggtgcttatatgtccaaggcccatgggatcgaccctaacatcaggaccggggtgagaacaattaccactggcagccccatacgtactccacctacggcaagttccttgccgacggcgggtgctcagggggtgcttatgacataataatctgtgacgagtgccactccacggatgccacgtccatcttaggcatcggcaccgtccttgccaagcagagaccgcaggggcgaggcttgttgtgctcgccaccgctacccctccgggctccatcactgtgccccatcctaacatcgaggaggttgctctgtccaccaccggagagatccccttttatggcaaggctatcccctcgaagtaatcaagggggggaggcatctcatcttctgtcattcaaagaagaagtgtgacgagctcgctgcaaagctggttgcattgggcgtcaatgccgtggcctattaccgcggtcttgacgtgttgtcatcccgaccagcggcgatgttgtcgtcgtggcaactgatgctctcatgaccggctataccggcgacttcgactcggtgatagactgcaacacgtgtgtcacccagacagtcgatttcagccttgaccccaccttcacattgagacaaccacgcttccccaggatgctgtctcccgtacacaacggcggggcaggactggcagggggaagccaggcacctacaggtttgtggcaccgggggagcgcccctctggcatgttcgactgtctgtcctctgtgagtgctatgacgcgggctgtgcttggtatgagctcacgcccgccgagaccacagttaggctacgagcgtacatgaacaccccggggcttcccgtgtgccaggaccaccttgaattttgggagggcgttttacgggccttacccatatagatgcccacttcctatcccagacaaagcagagtggggagaaccttccttacctggtagcgtaccaagccaccgtgtgcgctagggctcaagcccctcccccgtcgtggaccagatgtggaagtgtttagtccgcctcaagcccaccctccatgggccaacacccctgctatacagattgggcgctgttcagaatgaagtcaccctgacacacccaatcacaaaatacatcatgacatgtatgtcggcga

SEQ ID NO: 286 - DNA, 5221 bp, Hepatitis C virus
tcactcccctgtgaggaactactgtcttcacgcagaaagcgtctagccatggcgttagtatgagtgtcgtgcagcctccaggaccccccctcccgggagagccatagtggtctgcggaaccggtgagacaccggaattgccaggacgaccgggtcctttcttggataaacccgctcaatgcctggagatttgggcgtgcccccgcaagactgctagccgagtagtgttgggtcgcgaaaggccttgtggtactgctgatagggtgcttgcgagtgccccgggaggtctcgtagaccgtgcaccatgagcacgaatcctaaacctcaaagaaaaaccaaacgtaacaccaaccgtcgcccacaggacgtcaagttcccgggtggcggtcagatcgtggtggagtttacttgttgccgcgcaggggccctagattgggtgtgcgcgcgacgaggaagacttccgagcggtcgcaacctcgaggtagacgtcagcctatccccaaggcacgtcggcccgagggcagacctgggctcagcccgggtacccctggcccctctatggcaatgagggctgcgggtgggcgggatggctcctgtctccccgtggctctcggcctaactggggccccacagacccccggcgtaggtcgcgtaatttgggtaagtcatcgatacccttacatgcggcttcgccgacctcatggggtacataccgctcgtcggcgcccctcttgggggcgctgccagggccctggcgcatggcgtccgggttctggaagacggcgtgaacttgcaacagggaaccttcctggttgctctttctctatcttccttctggctttgctctcttgcctgactgtgcctgcttcagcctaccaagtgcgcaactccacggggctttatcatgtcaccaatgattgccctaactcgagattgtgtacgaggcggacgatgctatcctgcacactccggggtgtgtcccttgcgtccgcgagggtaacggctcgaggtgttgggtggcgataacccccacggtggccaccagggacggcaaactcccacagtgcagcttcgacgtcacatcgatctgctcgtcgggagcgctaccctttgttcggccctttacgtgggggacctgtgcgggtctgtctttcttgtcggccaactgttcaccttctctcccaggcgccactggacaaccaggactgcaattgttccatctatcccggccatataacgggtcaccgtatggcatgggacatgatgatgaactggtcccctacgacggcgctggtagtagctcagatgctccggatcccacaagccacctggacatgatcgctggtgctcactggggagtcctggcgggcatagcgtatttctccatggtggggaactgggcgaaggtcctggtagtgctgctgctatttgccggcgtcgacgcgggaacccacgtcaccgggggcatgccgcccgtaccacgtctagaattgctggtctcttcaacccaggcgcccagcaggacatccagctggttaacaccaacggcagttggcacatcaacagaacggccttgaactgtaacgatagccttccaccggctggatagcggggcttttctatcgctacaaattcaactcttcaggctgtcccgagaggttggccagctgccgaccccttaccgattttgcccagggctggggccctattagttacgccaacggaagcggccccgacaacgcccctactgctggcactatcccccaaagccttgcggcattgtgcccgcacagagcgtgtgtggcccggtgtattgcttcactcccagccccgtggtggtgggaacgaccgacaaggcgggcggcctacctacagatggggtgcaaacgatacggacgtcttcgtccttaacaacaccaggccaccactgggcaattggttcggttgcacctggatgaactcaactggatacaccaaagtgtgcggggcgcccccctgcgtcatggaggggtgggcaacaagaccttgcactgccccaccgattgtttccgcaagcatccggaagccacatactctcggtgcggctccggtccctggattacacccaggtgtctggtcgactatccgtatagctttggcattacccttgtaccatcaactacaccgtgttcaaagtcaggatgtacgtgggaggggtcgagcataggctggaggctgcctgcaactggacgcggggcgaacgttgcaatctggaagacagggacaggtccgactcagcccgttgctgctgtccaccacacagtggcaagtccttccgtgttccttcacgaccctgccagccttgtccaccggcctcatccacctccaccagaacattgtggacgtgcagtacttatacgggtggggtcaagcatcgcgtcctgggccatcaagtgggagtacgtcgttctcctattccttctgctcgcagacgcgcgcgtctgctcctgcttgtggatgatgttactcatatcccaagcggaggcggctttggagaacctgtagtgctcaatgcagcatctttggccgggacacacggtcttgtgtccctcctcgtgttcttctgctttgcgtggtacctgaagggtaggtgggtgcccggagcggtctacgccctctacgggatgtgcctctcctcctgctcctattggcgttgccccagcgggcatatgcgttggacacggaggtggccgcgtcgtgtggcggcgctgttcttgtcgggttgatggcgctgactctgtcaccatattacaagcgctatgtcagctgtgcttatggtggcttcagtactttctgaccagagcagaagcgcaactgcacgtgtgggttccccctctcgacgtccgaggggggcgcgacgccgtcatcttactcatgtgtgctgtacgcccggcttggtgtttgacatcaccaagctgctgctggccgtcctcggacccctctggattctccaagccagtttgcttaaagtgccctactttgtgcgcgttcaaggccttctccggatctgcgcgctagcgcggaagatggcggggggcattacgtgcaaatggtcatcatcaagttgggggcgctcactggcacttatgtgtataaccatctcactcctcttcgggactgggcgcacaacggcctgcgagatctgactgtggctgtagagccagcgtcttctcccgaatggagaccaacctcatcacgtggggggcagacaccgccgcatgcggcgacatcatcaacggcttgcccgtctccgcccgcaggggccgggagatactgctcggaccagccgacggaatggtctccaagggtggaggttgctggcacccatcacggcatacgcccagcagacaaggggcctcctagggtgtataatcaccagcctaaccggccgggacaaaaatcaggtggagggtgaggtccagattgtgtcaatgctgcccaaacctttctggcaacgtgcatcaatggagtatgctggaccgtctaccacggggccggaacgaggaccatcgcatcacccaagggtcctgttatccagatgtacaccaatgtagataaagatctcgtgggttgcccgctcctcaaggttcccgttctttggcaccctgcacctgcggctcctcggacctttatctggtcacgaggcacgccgatgtcattcccgtgcgccggcggggtgatagcaggggcagcctgctttgccccggcccatttcctacttgaaaggctcctcggggggtccgctgttgtgccccgcggggcacgccgtgggcattttcagggccgcggtgtgcacccgtggagtggctaaggcagtggactttatccctgtagagaacctgagacaaccatgaggtccccggtgttcacggacaactcctctccaccagcagtaccccagagcttccaggtggcccacctgcatgctcccacaggcagcggcaagagcaccaaggtcccagctgcatcgcagctcagggctataaggtgctagtgctcaacccctctgttgctgcaacactaggcttcggtgcttatatgtccaaggcccatgggatcgaccctaacatcaggaccggggtgagaacaattaccactggcagccccatacgtactccacctacggcaagttccttgccgacggcgggtgctcagggggtgcttatgacataataatctgtgacgagtgccactccacggatgccacgtccatcttaggcatcggcaccgtccttgccaagcagagaccgcaggggcgaggcttgttgtgctcgccaccgctacccctccgggctccatcactgtgccccatcctaacatcgaggaggttgctctgtccaccaccggagagatccccttttatggcaaggctatcccctcgaagtaatcaagggggggaggcatctcatcttctgtcattcaaagaagaagtgtgacgagctcgctgcaaagctggttgcattgggcgtcaatgccgtggcctattaccgcggtcttgacgtgttgtcatcccgaccagcggcgatgttgtcgtcgtggcaactgatgctctcatgaccggctataccggcgacttcgactcggtgatagactgcaacacgtgtgtcacccagacagtcgatttcagccttgaccccaccttcacattgagacaaccacgcttccccaggatgctgtctcccgtacacaacggcggggcaggactggcagggggaagccaggcacctacaggtttgtggcaccgggggagcgcccctctggcatgttcgactgtctgtcctctgtgagtgctatgacgcgggctgtgcttggtatgagctcacgcccgccgagaccacagttaggctacgagcgtacatgaacaccccggggcttcccgtgtgccaggaccaccttgaattttgggagggcgttttacgggccttacccatatagatgcccacttcctatcccagacaaagcagagtggggagaaccttccttacctggtagcgtaccaagccaccgtgtgcgctagggctcaagcccctcccccgtcgtggaccagatgtggaagtgtttagtccgcctcaagcccaccctccatgggccaacacccctgctatacagattgggcgctgttcagaatgaagtcaccctgacacacccaatcacaaaatacatcatgacatgtatgtcggcga

SEQ ID NO: 287 - DNA, 4869 bp, Hepatitis C virus; identical to SEQ ID NO: 194

SEQ ID NO: 288 - DNA, 4869 bp, Hepatitis C virus
tcgcccacaggacgtcaagttcccgggtggcggtcagatcgttggtggagtttacttgttgccgcgcaggggccctagattgggtgtgcgcgcgacgaggaagacttccgagcggtcgcaacctcgagtagacgtcagcctatccccaaggcacgtcggcccgagggcaggacctgggctcagcccgggtacccctggcccctctatggcaatgagggctgcgggtgggcgggatggctcctgtctccccgtggtctcggcctaactggggccccacagacccccggcgtaggtcgcgtaatttgggtaaggtcatcgatacccttacatgcggcttcgccgacctcatggggtacataccgctcgtcggcgcccctcttgggggcgctgccaggccctggcgcatggcgtccgggttctggaagacggcgtgaactatgcaacagggaaccttcctggttgctctttctctatcttccttctggctttgctctcttgcctgactgtgcctgcttcagcctacaagtgcgcaactccacggggctttatcatgtcaccaatgattgccctaactcgagtattgtgtacgaggcggacgatgctatcctgcacactccggggtgtgtcccttgcgtccgcgagggtaacggctcgaggtgttggtggcgataacccccacggtggccaccagggacggcaaactccccacagtgcagcttcgacgtcacatcgatctgctcgtcgggagcgctaccctttgttcggccctttacgtgggggacctgtgcggtctgtctttcttgtcggccaactgttcaccttctctcccaggcgccactggacaacgcaggactgcaattgttccatctatcccggccatataacgggtcaccgtatggcatgggacatgatgatgaactggtcccctacgcggcgctggtagtagctcagatgctccggatcccacaagccatcctggacatgatcgctggtgctcactggggagtcctggcgggcatagcgtatttctccatggtggggaactgggcgaaggtcctgtagtgctgctgctatttgccggcgtcgacgcgggaacccacgtcaccgggggcattgccgcccgtaccacgtctagaattgctggtctcttcaacccaggcgcccagcaggacatccagctggttaacaccaacggcagtggcacatcaacagaacggccttgaactgtaacgatagccttcacaccggctggatagcggggcttttctatcgctacaaattcaactcttcaggctgtcccgagaggttggccagctgccgacccctaccgattttgcccagggctggggccctattagttacgccaacggaagcggccccgaccaacgcccctactgctggcactatcccccaaagccttgcggcattgtgcccgcacagagcgtgtgtggcccggtgtattgcttcctcccagccccgtggtggtgggaacgaccgacaaggcgggcgcgcctacctacagatggggtgcaaacgatacggacgtcttcgtccttaacaacaccaggccaccactgggcaattggttcggttgacctggatgaactcaactggatacaccaaagtgtgcggggcgcccccctgcgtcatcggaggggtgggcaacaagaccttgcactgccccaccgattgtttccgcaagcatccggaagccacatactctcggtgcggctccgtccctggattacacccaggtgtctggtcgactatccgtataggctttggcattacccttgtaccatcaactacaccgtgttcaaagtcaggatgtacgtgggaggggtcgagcataggctggaggcgcctgcaactggacgcggggcgaacgttgcaatctggaagacagggacaggtccgagctcagcccgttgctgctgtccaccacacagtggcaagtccttccgtgttccttcacgaccctgccagccttgtccaccggcctctccacctccaccagaacattgtggacgtgcagtacttatacggggtggggtcaagcatcgcgtcctgggccatcaagtgggagtacgtcgttctcctattccttctgctcgcagacgcgcgcgtctgtcctgcttgtggatgatgttactcatatcccaagcggaggcggctttggagaacctcgtagtgctcaatgcagcatctttggccgggacacacggtcttgtgtccctcctcgtgttcttctgctttgcgtggtacctgaaggtaggtgggtgcccggagcggtctacgccctctacgggatgtggcctctcctcctgctcctattggcgttgccccagcgggcatatgcgttggacacggaggtggccgcgtcgtgtggcggcgctgtcttgtcgggttgatggcgctgactctgtcaccatattacaagcgctatgtcagctggtgcttatggtggcttcagtactttctgaccagagcagaagcgcaactgcacgtgtgggttccccctctcgacgtccgagggggggcgacgccgtcatcttactcatgtgtgctgtacgcccggctttggtgtttgacatcaccaagctgctgctggccgtcctcggacccctctggattctccaagccagtttgcttaaagtgccctacttgtgcgcgttcaaggccttctccggatctgcgcgctagcgcggaagatggcggggggtcattacgtgcaaatggtcatcatcaagttgggggcgctcactggcacttatgtgtataaccatctcactcctcttcgggactggcgcacaacggcctgcgagatctggctgtggctgtagagccagtcgtcttctcccgaatggagaccaacctcatcacgtggggggcagacaccgccgcatgcggcgacatcatcaacggcttgcccgttccgcccgcaggggccgggagatactgctcggaccagccgacggaatggtctccaaggggtggaggttgctggcacccatcacggcatacgcccagcagacaaggggcctcctagggtgtataatcaccagcctaaccggcgggacaaaaatcaggtggagggtgaggtccagattgtgtcaactgctgcccaaacctttctggcaacgtgcatcaatggagtatgctggaccgtctaccacggggccggaacgaggaccatcgcatccccaagggtcctgttatccagatgtacaccaatgtagataaagatctcgtgggttggcccgctcctcaaggttcccgttctttggcaccctgcacctgcggctcctcggacctttatctggtcacgaggcacgccgatgtcttcccgtgcgccggcggggtgatagcaggggcagcctgctttcgccccggcccatttcctacttgaaaggctcttcggggggtccgctgttgtgccccgcggggcacgccgtgggcattttcagggcgcggtgtgcacccgtggagtggctaaggcagtggactttatccctgtagagaacctagagacaaccatgaggtccccggtgttcacggacaactcctctccaccagcagtaccccagagcttccaggtggcccacctgcatctcccacaggcagcggcaagagcaccaaggtcccagctgcatacgcagctcagggctataaggtgctagtgctcaacccctctgttgctgcaacactaggcttcggtgcttatatgtccaaggcccagggatcgaccctaacatcaggaccggggtgagaacaattaccactggcagccccatcacgtactccacctacggcaagttccttgccgacggcgggtgctcagggggtgcttatgacataataatctgtgacgagtgccacccacggatgccacgtccatcttaggcatcggcaccgtccttgaccaagcagagaccgcaggggcgaggcttgttgtgctcgccaccgctacccctccgggctccatcactgtgccccatcctaacatgaggaggttgctctgtccaccaccggagagatccccttttatggcaaggctatccccctcgaagtaatcaagggggggaggcatctcatcttctgtcattcaaagaagaagtgtgacgagctcgctgcaaagctggttgcatgggcgtcaatgccgtggcctattaccgcggtcttgacgtgtctgtcatcccgaccagcggcgatgttgtcgtcgtggcaactgatgctctcatgaccggctataccggcgacttcgactcggtgatgactgcaacacgtgtgtcacccagacagtcgatttcagccttgaccccaccttcaccattgagacaaccacgcttccccaggatgctgtctcccgtacacaacggcggggcaggactggcagggggaagccaggcacctacggtttgtggcaccgggggagcgcccctctggcatgttcgactcgtctgtcctctgtgagtgctatgacgcgggctgtgcttggtatgagctcacgcccgccgagaccacagttaggctacgagcgtaatgaacaccccggggcttcccgtgtgccaggaccaccttgaattttgggagggcgtctttacgggccttacccatatagatgcccacttcctatcccagacaaagcagagtggggagaaccttccttacctggtagcgtacaagccaccgtgtgcgctagggctcaagcccctcccccgtcgtgggaccagatgtggaagtgtttagtccgcctcaagcccaccctccatgggccaacacccctgctatacagattgggcgctgttcaaatgaagtcaccctgacacacccaatcacaaaatacatcatgacatgtatgtcggctga

SEQ ID NO: 289 - DNA, 4869 bp, Hepatitis C virus
tcgcccacaggacgtcaagttcccgggtggcggtcagatcgttggtggagtttacttgttgccgcgcaggggccctagattgggtgtgcgcgcgacgaggaagacttccgagcggtcgcaacctcgagtagacgtcagcctatccccaaggcacgtcggcccgagggcaggacctgggctcagcccgggtacccctggcccctctatggcaatgagggctgcgggtgggcgggatggctcctgtctccccgtggtctcggcctaactggggccccacagacccccggcgtaggtcgcgtaatttgggtaaggtcatcgatacccttacatgcggcttcgccgacctcatggggtacataccgctcgtcggcgcccctcttgggggcgctgccaggccctggcgcatggcgtccgggttctggaagacggcgtgaactatgcaacagggaaccttcctggttgctctttctctatcttccttctggctttgctctcttgcctgactgtgcctgcttcagcctacaagtgcgcaactccacggggctttatcatgtcaccaatgattgccctaactcgagtattgtgtacgaggcggacgatgctatcctgcacactccggggtgtgtcccttgcgtccgcgagggtaacggctcgaggtgttggtggcgataacccccacggtggccaccagggacggcaaactccccacagtgcagcttcgacgtcacatcgatctgctcgtcgggagcgctaccctttgttcggccctttacgtgggggacctgtgcggtctgtctttcttgtcggccaactgttcaccttctctcccaggcgccactggacaacgcaggactgcaattgttccatctatcccggccatataacgggtcaccgtatggcatgggacatgatgatgaactggtcccctacgcggcgctggtagtagctcagatgctccggatcccacaagccatcctggacatgatcgctggtgctcactggggagtcctggcgggcatagcgtatttctccatggtggggaactgggcgaaggtcctgtagtgctgctgctatttgccggcgtcgacgcgggaacccacgtcaccgggggcattgccgcccgtaccacgtctagaattgctggtctcttcaacccaggcgcccagcaggacatccagctggttaacaccaacggcagtggcacatcaacagaacggccttgaactgtaacgatagccttcacaccggctggatagcggggcttttctatcgctacaaattcaactcttcaggctgtcccgagaggttggccagctgccgacccctaccgattttgcccagggctggggccctattagttacgccaacggaagcggccccgaccaacgcccctactgctggcactatcccccaaagccttgcggcattgtgcccgcacagagcgtgtgtggcccggtgtattgcttcctcccagccccgtggtggtgggaacgaccgacaaggcgggcgcgcctacctacagatggggtgcaaacgatacggacgtcttcgtccttaacaacaccaggccaccactgggcaattggttcggttgacctggatgaactcaactggatacaccaaagtgtgcggggcgcccccctgcgtcatcggaggggtgggcaacaagaccttgcactgccccaccgattgtttccgcaagcatccggaagccacatactctcggtgcggctccgtccctggattacacccaggtgtctggtcgactatccgtataggctttggcattacccttgtaccatcaactacaccgtgttcaaagtcaggatgtacgtgggaggggtcgagcataggctggaggcgcctgcaactggacgcggggcgaacgttgcaatctggaagacagggacaggtccgagctcagcccgttgctgctgtccaccacacagtggcaagtccttccgtgttccttcacgaccctgccagccttgtccaccggcctctccacctccaccagaacattgtggacgtgcagtacttatacggggtggggtcaagcatcgcgtcctgggccatcaagtgggagtacgtcgttctcctattccttctgctcgcagacgcgcgcgtctgtcctgcttgtggatgatgttactcatatcccaagcggaggcggctttggagaacctcgtagtgctcaatgcagcatctttggccgggacacacggtcttgtgtccctcctcgtgttcttctgctttgcgtggtacctgaaggtaggtgggtgcccggagcggtctacgccctctacgggatgtggcctctcctcctgctcctattggcgttgccccagcgggcatatgcgttggacacggaggtggccgcgtcgtgtggcggcgctgtcttgtcgggttgatggcgctgactctgtcaccatattacaagcgctatgtcagctggtgcttatggtggcttcagtactttctgaccagagcagaagcgcaactgcacgtgtgggttccccctctcgacgtccgagggggggcgacgccgtcatcttactcatgtgtgctgtacgcccggctttggtgtttgacatcaccaagctgctgctggccgtcctcggacccctctggattctccaagccagtttgcttaaagtgccctacttgtgcgcgttcaaggccttctccggatctgcgcgctagcgcggaagatggcggggggtcattacgtgcaaatggtcatcatcaagttgggggcgctcactggcacttatgtgtataaccatctcactcctcttcgggactggcgcacaacggcctgcgagatctggctgtggctgtagagccagtcgtcttctcccgaatggagaccaacctcatcacgtggggggcagacaccgccgcatgcggcgacatcatcaacggcttgcccgttccgcccgcaggggccgggagatactgctcggaccagccgacggaatggtctccaaggggtggaggttgctggcacccatcacggcatacgcccagcagacaaggggcctcctagggtgtataatcaccagcctaaccggcgggacaaaaatcaggtggagggtgaggtccagattgtgtcaactgctgcccaaacctttctggcaacgtgcatcaatggagtatgctggaccgtctaccacggggccggaacgaggaccatcgcatccccaagggtcctgttatccagatgtacaccaatgtagataaagatctcgtgggttggcccgctcctcaaggttcccgttctttggcaccctgcacctgcggctcctcggacctttatctggtcacgaggcacgccgatgtcttcccgtgcgccggcggggtgatagcaggggcagcctgctttcgccccggcccatttcctacttgaaaggctcctcggggggtccgctgttgtgccccgcggggcacgccgtgggcattttcagggcgcggtgtgcacccgtggagtggctaaggcagtggactttatccctgtagagaacctagagacaaccatgaggtccccggtgttcacggacaactcctctccaccagcagtaccccagaacttccaggtggcccacctgcatctcccacaggcagcggcaagagcaccaaggtcccagctgcatacgcagctcagggctataaggtgctagtgctcaacccctctgttgctgcaacactaggcttcggtgcttatatgtccaaggcccagggatcgaccctaacatcaggaccggggtgagaacaattaccactggcagccccatcacgtactccacctacggcaagttccttgccgacggcgggtgctcagggggtgcttatgacataataatctgtgacgagtgccacccacggatgccacgtccatcttaggcatcggcaccgtccttgaccaagcagagaccgcaggggcgaggcttgttgtgctcgccaccgctacccctccgggctccatcactgtgccccatcctaacatgaggaggttgctctgtccaccaccggagagatccccttttatggcaaggctatccccctcgaagtaatcaagggggggaggcatctcatcttctgtcattcaaagaagaagtgtgacgagctcgctgcaaagctggttgcatgggcgtcaatgccgtggcctattaccgcggtcttgacgtgtctgtcatcccgaccagcggcgatgttgtcgtcgtggcaactgatgctctcatgaccggctataccggcgacttcgactcggtgatgactgcaacacgtgtgtcacccagacagtcgatttcagccttgaccccaccttcaccattgagacaaccacgcttccccaggatgctgtctcccgtacacaacggcggggcaggactggcagggggaagccaggcacctacggtttgtggcaccgggggagcgcccctctggcatgttcgactcgtctgtcctctgtgagtgctatgacgcgggctgtgcttggtatgagctcacgcccgccgagaccacagttaggctacgagcgtaatgaacaccccggggcttcccgtgtgccaggaccaccttgaattttgggagggcgtctttacgggccttacccatatagatgcccacttcctatcccagacaaagcagagtggggagaaccttccttacctggtagcgtacaagccaccgtgtgcgctagggctcaagcccctcccccgtcgtgggaccagatgtggaagtgtttagtccgcctcaagcccaccctccatgggccaacacccctgctatacagattgggcgctgttcaaatgaagtcaccctgacacacccaatcacaaaatacatcatgacatgtatgtcggctga

SEQ ID NO: 290 - DNA, 4869 bp, Hepatitis C virus
tcgcccacaggacgtcaagttcccgggtggcggtcagatcgttggtggagtttacttgttgccgcgcaggggccctagattgggtgtgcgcgcgacgaggaagacttccgagcggtcgcaacctcgagtagacgtcagcctatccccaaggcacgtcggcccgagggcaggacctgggctcagcccgggtacccctggcccctctatggcaatgagggctgcgggtgggcgggatggctcctgtctccccgtggtctcggcctaactggggccccacagacccccggcgtaggtcgcgtaatttgggtaaggtcatcgatacccttacatgcggcttcgccgacctcatggggtacataccgctcgtcggcgcccctcttgggggcgctgccaggccctggcgcatggcgtccgggttctggaagacggcgtgaactatgcaacagggaaccttcctggttgctctttctctatcttccttctggctttgctctcttgcctgactgtgcctgcttcagcctacaagtgcgcaactccacggggctttatcatgtcaccaatgattgccctaactcgagtattgtgtacgaggcggacgatgctatcctgcacactccggggtgtgtcccttgcgtccgcgagggtaacggctcgaggtgttggtggcgataacccccacggtggccaccagggacggcaaactccccacagtgcagcttcgacgtcacatcgatctgctcgtcgggagcgctaccctttgttcggccctttacgtgggggacctgtgcggtctgtctttcttgtcggccaactgttcaccttctctcccaggcgccactggacaacgcaggactgcaattgttccatctatcccggccatataacgggtcaccgtatggcatgggacatgatgatgaactggtcccctacgcggcgctggtagtagctcagatgctccggatcccacaagccatcctggacatgatcgctggtgctcactggggagtcctggcgggcatagcgtatttctccatggtggggaactgggcgaaggtcctgtagtgctgctgctatttgccggcgtcgacgcgggaacccacgtcaccgggggcattgccgcccgtaccacgtctagaattgctggtctcttcaacccaggcgcccagcaggacatccagctggttaacaccaacggcagtggcacatcaacagaacggccttgaactgtaacgatagccttcacaccggctggatagcggggcttttctatcgctacaaattcaactcttcaggctgtcccgagaggttggccagctgccgacccctaccgattttgcccagggctggggccctattagttacgccaacggaagcggccccgaccaacgcccctactgctggcactatcccccaaagccttgcggcattgtgcccgcacagagcgtgtgtggcccggtgtattgcttcctcccagccccgtggtggtgggaacgaccgacaaggcgggcgcgcctacctacagatggggtgcaaacgatacggacgtcttcgtccttaacaacaccaggccaccactgggcaattggttcggttgacctggatgaactcaactggatacaccaaagtgtgcggggcgcccccctgcgtcatcggaggggtgggcaacaagaccttgcactgccccaccgattgtttccgcaagcatccggaagccacatactctcggtgcggctccgtccctggattacacccaggtgtctggtcgactatccgtataggctttggcattacccttgtaccatcaactacaccgtgttcaaagtcaggatgtacgtgggaggggtcgagcataggctggaggcgcctgcaactggacgcggggcgaacgttgcaatctggaagacagggacaggtccgagctcagcccgttgctgctgtccaccacacagtggcaagtccttccgtgttccttcacgaccctgccagccttgtccaccggcctctccacctccaccagaacattgtggacgtgcagtacttatacggggtggggtcaagcatcgcgtcctgggccatcaagtgggagtacgtcgttctcctattccttctgctcgcagacgcgcgcgtctgtcctgcttgtggatgatgttactcatatcccaagcggaggcggctttggagaacctcgtagtgctcaatgcagcatctttggccgggacacacggtcttgtgtccctcctcgtgttcttctgctttgcgtggtacctgaaggtaggtgggtgcccggagcggtctacgtcctctacgggatgtggcctctcctcctgctcctattggcgttgccccagcgggcatatgcgttggacacggaggtggccgcgtcgtgtggcggcgctgtcttgtcgggttgatggcgctgactctgtcaccatattacaagcgctatgtcagctggtgcttatggtggcttcagtactttctgaccagagcagaagcgcaactgcacgtgtgggttccccctctcgacgtccgagggggggcgacgccgtcatcttactcatgtgtgctgtacgcccggctttggtgtttgacatcaccaagctgctgctggccgtcctcggacccctctggattctccaagccagtttgcttaaagtgccctacttgtgcgcgttcaaggccttctccggatctgcgcgctagcgcggaagatggcggggggtcattacgtgcaaatggtcatcatcaagttgggggcgctcactggcacttatgtgtataaccatctcactcctcttcgggactggcgcacaacggcctgcgagatctggctgtggctgtagagccagtcgtcttctcccgaatggagaccaacctcatcacgtggggggcagacaccgccgcatgcggcgacatcatcaacggcttgcccgttccgcccgcaggggccgggagatactgctcggaccagccgacggaatggtctccaaggggtggaggttgctggcacccatcacggcatacgcccagcagacaaggggcctcctagggtgtataatcaccagcctaaccggcgggacaaaaatcaggtggagggtgaggtccagattgtgtcaactgctgcccaaacctttctggcaacgtgcatcaatggagtatgctggaccgtctaccacggggccggaacgaggaccatcgcatccccaagggtcctgttatccagatgtacaccaatgtagataaagatctcgtgggttggcccgctcctcaaggttcccgttctttggcaccctgcacctgcggctcctcggacctttatctggtcacgaggcacgccgatgtcttcccgtgcgccggcggggtgatagcaggggcagcctgctttcgccccggcccatttcctacttgaaaggctcctcggggggtccgctgttgtgccccgcggggcacgccgtgggcattttcagggcgcggtgtgcacccgtggagtggctaaggcagtggactttatccctgtagagaacctagagacaaccatgaggtccccggtgttcacggacaactcctctccaccagcagtaccccagagcttccaggtggcccacctgcatctcccacaggcagcggcaagagcaccaaggtcccagctgcatacgcagctcagggctataaggtgctagtgctcaacccctctgttgctgcaacactaggcttcggtgcttatatgtccaaggcccagggatcgaccctaacatcaggaccggggtgagaacaattaccactggcagccccatcacgtactccacctacggcaagttccttgccgacggcgggtgctcagggggtgcttatgacataataatctgtgacgagtgccacccacggatgccacgtccatcttaggcatcggcaccgtccttgaccaagcagagaccgcaggggcgaggcttgttgtgctcgccaccgctacccctccgggctccatcactgtgccccatcctaacatgaggaggttgctctgtccaccaccggagagatccccttttatggcaaggctatccccctcgaagtaatcaagggggggaggcatctcatcttctgtcattcaaagaagaagtgtgacgagctcgctgcaaagctggttgcatgggcgtcaatgccgtggcctattaccgcggtcttgacgtgtctgtcatcccgaccagcggcgatgttgtcgtcgtggcaactgatgctctcatgaccggctataccggcgacttcgactcggtgatgactgcaacacgtgtgtcacccagacagtcgatttcagccttgaccccaccttcaccattgagacaaccacgcttccccaggatgctgtctcccgtacacaacggcggggcaggactggcagggggaagccaggcacctacggtttgtggcaccgggggagcgcccctctggcatgttcgactcgtctgtcctctgtgagtgctatgacgcgggctgtgcttggtatgagctcacgcccgccgagaccacagttaggctacgagcgtaatgaacaccccggggcttcccgtgtgccaggaccaccttgaattttgggagggcgtctttacgggccttacccatatagatgcccacttcctatcccagacaaagcagagtggggagaaccttccttacctggtagcgtacaagccaccgtgtgcgctagggctcaagcccctcccccgtcgtgggaccagatgtggaagtgtttagtccgcctcaagcccaccctccatgggccaacacccctgctatacagattgggcgctgttcaaatgaagtcaccctgacacacccaatcacaaaatacatcatgacatgtatgtcggctga

SEQ ID NO: 291 - DNA, 4869 bp, Hepatitis C virus
tcgcccacaggacgtcaagttcccgggtggcggtcagatcgttggtggagtttacttgttgccgcgcaggggccctagattgggtgtgcgcgcgacgaggaagacttccgagcggtcgcaacctcgagtagacgtcagcctatccccaaggcacgtcggcccgagggcaggacctgggctcagcccgggtacccctggcccctctatggcaatgagggctgcgggtgggcgggatggctcctgtctccccgtggtctcggcctaactggggccccacagacccccggcgtaggtcgcgtaatttgggtaaggtcatcgatacccttacatgcggcttcgccgacctcatggggtacataccgctcgtcggcgcccctcttgggggcgctgccaggccctggcgcatggcgtccgggttctggaagacggcgtgaactatgcaacagggaaccttcctggttgctctttctctatcttccttctagctttgctctcttgcctgactgtgcctgcttcagcctacaagtgcgcaactccacggggctttatcatgtcaccaatgattgccctaactcgagtattgtgtacgaggcggacgatgctatcctgcacactccggggtgtgtcccttgcgtccgcgagggtaacggctcgaggtgttggtggcgataacccccacggtggccaccagggacggcaaactccccacagtgcagcttcgacgtcacatcgatctgctcgtcgggagcgctaccctttgttcggccctttacgtgggggacctgtgcggtctgtctttcttgtcggccaactgttcaccttctctcccaggcgccactggacaacgcaggactgcaattgttccatctatcccggccatataacgggtcaccgtatggcatgggacatgatgatgaactggtcccctacgcggcgctggtagtagctcagatgctccggatcccacaagccatcctggacatgatcgctggtgctcactggggagtcctggcgggcatagcgtatttctccatggtggggaactgggcgaaggtcctgtagtgctgctgctatttgccggcgtcgacgcgggaacccacgtcaccgggggcattgccgcccgtaccacgtctagaattgctggtctcttcaacccaggcgcccagcaggacatccagctggttaacaccaacggcagtggcacatcaacagaacggccttgaactgtaacgatagccttcacaccggctggatagcggggcttttctatcgctacaaattcaactcttcaggctgtcccgagaggttggccagctgccgacccctaccgattttgcccagggctggggccctattagttacgccaacggaagcggccccgaccaacgcccctactgctggcactatcccccaaagccttgcggcattgtgcccgcacagagcgtgtgtggcccggtgtattgcttcctcccagccccgtggtggtgggaacgaccgacaaggcgggcgcgcctacctacagatggggtgcaaacgatacggacgtcttcgtccttaacaacaccaggccaccactgggcaattggttcggttgacctggatgaactcaactggatacaccaaagtgtgcggggcgcccccctgcgtcatcggaggggtgggcaacaagaccttgcactgccccaccgattgtttccgcaagcatccggaagccacatactctcggtgcggctccgtccctggattacacccaggtgtctggtcgactatccgtataggctttggcattacccttgtaccatcaactacaccgtgttcaaagtcaggatgtacgtgggaggggtcgagcataggctggaggcgcctgcaactggacgcggggcgaacgttgcaatctggaagacagggacaggtccgagctcagcccgttgctgctgtccaccacacagtggcaagtccttccgtgttccttcacgaccctgccagccttgtccaccggcctctccacctccaccagaacattgtggacgtgcagtacttatacggggtggggtcaagcatcgcgtcctgggccatcaagtgggagtacgtcgttctcctattccttctgctcgcagacgcgcgcgtctgtcctgcttgtggatgatgttactcatatcccaagcggaggcggctttggagaacctcgtagtgctcaatgcagcatctttggccgggacacacggtcttgtgtccctcctcgtgttcttctgctttgcgtggtacctgaaggtaggtgggtgcccggagcggtctacgccctctacgggatgtggcctctcctcctgctcctattggcgttgccccagcgggcatatgcgttggacacggaggtggccgcgtcgtgtggcggcgctgtcttgtcgggttgatggcgctgactctgtcaccatattacaagcgctatgtcagctggtgcttatggtggcttcagtactttctgaccagagcagaagcgcaactgcacgtgtgggttccccctctcgacgtccgagggggggcgacgccgtcatcttactcatgtgtgctgtacgcccggctttggtgtttgacatcaccaagctgctgctggccgtcctcggacccctctggattctccaagccagtttgcttaaagtgccctacttgtgcgcgttcaaggccttctccggatctgcgcgctagcgcggaagatggcggggggtcattacgtgcaaatggtcatcatcaagttgggggcgctcactggcacttatgtgtataaccatctcactcctcttcgggactggcgcacaacggcctgcgagatctggctgtggctgtagagccagtcgtcttctcccgaatggagaccaacctcatcacgtggggggcagacaccgccgcatgcggcgacatcatcaacggcttgcccgttccgcccgcaggggccgggagatactgctcggaccagccgacggaatggtctccaaggggtggaggttgctggcacccatcacggcatacgcccagcagacaaggggcctcctagggtgtataatcaccagcctaaccggcgggacaaaaatcaggtggagggtgaggtccagattgtgtcaactgctgcccaaacctttctggcaacgtgcatcaatggagtatgctggaccgtctaccacggggccggaacgaggaccatcgcatccccaagggtcctgttatccagatgtacaccaatgtagataaagatctcgtgggttggcccgctcctcaaggttcccgttctttggcaccctgcacctgcggctcctcggacctttatctggtcacgaggcacgccgatgtcttcccgtgcgccggcggggtgatagcaggggcagcctgctttcgccccggcccatttcctacttgaaaggctcctcggggggtccgctgttgtgccccgcggggcacgccgtgggcattttcagggcgcggtgtgcacccgtggagtggctaaggcagtggactttatccctgtagagaacctagagacaaccatgaggtccccggtgttcacggacaactcctctccaccagcagtaccccagagcttccaggtggcccacctgcatctcccacaggcagcggcaagagcaccaaggtcccagctgcatacgcagctcagggctataaggtgctagtgctcaacccctctgttgctgcaacactaggcttcggtgcttatatgtccaaggcccagggatcgaccctaacatcaggaccggggtgagaacaattaccactggcagccccatcacgtactccacctacggcaagttccttgccgacggcgggtgctcagggggtgcttatgacataataatctgtgacgagtgccacccacggatgccacgtccatcttaggcatcggcaccgtccttgaccaagcagagaccgcaggggcgaggcttgttgtgctcgccaccgctacccctccgggctccatcactgtgccccatcctaacatgaggaggttgctctgtccaccaccggagagatccccttttatggcaaggctatccccctcgaagtaatcaagggggggaggcatctcatcttctgtcattcaaagaagaagtgtgacgagctcgctgcaaagctggttgcatgggcgtcaatgccgtggcctattaccgcggtcttgacgtgtctgtcatcccgaccagcggcgatgttgtcgtcgtggcaactgatgctctcatgaccggctataccggcgacttcgactcggtgatgactgcaacacgtgtgtcacccagacagtcgatttcagccttgaccccaccttcaccattgagacaaccacgcttccccaggatgctgtctcccgtacacaacggcggggcaggactggcagggggaagccaggcacctacggtttgtggcaccgggggagcgcccctctggcatgttcgactcgtctgtcctctgtgagtgctatgacgcgggctgtgcttggtatgagctcacgcccgccgagaccacagttaggctacgagcgtaatgaacaccccggggcttcccgtgtgccaggaccaccttgaattttgggagggcgtctttacgggccttacccatatagatgcccacttcctatcccagacaaagcagagtggggagaaccttccttacctggtagcgtacaagccaccgtgtgcgctagggctcaagcccctcccccgtcgtgggaccagatgtggaagtgtttagtccgcctcaagcccaccctccatgggccaacacccctgctatacagattgggcgctgttcaaatgaagtcaccctgacacacccaatcacaaaatacatcatgacatgtatgtcggctga

SEQ ID NO: 292 - DNA, 4869 bp, Hepatitis C virus; identical to SEQ ID NO: 194

SEQ ID NO: 293 - DNA, 5221 bp, Hepatitis C virus
tcactcccctgtgaggaactactgtcttcacgcagaaagcgtctagccatggcgttagtatgagtgtcgtgcagcctccaggaccccccctcccgggagagccatagtggtctgcggaaccggtgagacaccggaattgccaggacgaccgggtcctttcttggataaacccgctcaatgcctggagatttgggcgtgcccccgcaagactgctagccgagtagtgttgggtcgcgaaaggccttgtggtactgctgatagggtgcttgcgagtgccccgggaggtctcgtagaccgtgcaccatgagcacgaatcctaaacctcaaagaaaaaccaaacgtaacaccaaccgtcgcccacaggacgtcaagttcccgggtggcggtcagatcgtggtggagtttacttgttgccgcgcaggggccctagattgggtgtgcgcgcgacgaggaagacttccgagcggtcgcaacctcgaggtagacgtcagcctatccccaaggcacgtcggcccgagggcagacctgggctcagcccgggtacccctggcccctctatggcaatgagggctgcgggtgggcgggatggctcctgtctccccgtggctctcggcctaactggggccccacagacccccggcgtaggtcgcgtaatttgggtaagtcatcgatacccttacatgcggcttcgccgacctcatggggtacataccgctcgtcggcgcccctcttgggggcgctgccagggccctggcgcatggcgtccgggttctggaagacggcgtgaacttgcaacagggaaccttcctggttgctctttctctatcttccttctggctttgctctcttgcctgactgtgcctgcttcagcctaccaagtgcgcaactccacggggctttatcatgtcaccaatgattgccctaactcgagattgtgtacgaggcggacgatgctatcctgcacactccggggtgtgtcccttgcgtccgcgagggtaacggctcgaggtgttgggtggcgataacccccacggtggccaccagggacggcaaactcccacagtgcagcttcgacgtcacatcgatctgctcgtcgggagcgctaccctttgttcggccctttacgtgggggacctgtgcgggtctgtctttcttgtcggccaactgttcaccttctctcccaggcgccactggacaaccaggactgcaattgttccatctatcccggccatataacgggtcaccgtatggcatgggacatgatgatgaactggtcccctacgacggcgctggtagtagctcagatgctccggatcccacaagccacctggacatgatcgctggtgctcactggggagtcctggcgggcatagcgtatttctccatggtggggaactgggcgaaggtcctggtagtgctgctgctatttgccggcgtcgacgcgggaacccacgtcaccgggggcatgccgcccgtaccacgtctagaattgctggtctcttcaacccaggcgcccagcaggacatccagctggttaacaccaacggcagttggcacatcaacagaacggccttgaactgtaacgatagccttccaccggctggatagcggggcttttctatcgctacaaattcaactcttcaggctgtcccgagaggttggccagctgccgaccccttaccgattttgcccagggctggggccctattagttacgccaacggaagcggccccgacaacgcccctactgctggcactatcccccaaagccttgcggcattgtgcccgcacagagcgtgtgtggcccggtgtattgcttcactcccagccccgtggtggtgggaacgaccgacaaggcgggcggcctacctacagatggggtgcaaacgatacggacgtcttcgtccttaacaacaccaggccaccactgggcaattggttcggttgcacctggatgaactcaactggatacaccaaagtgtgcggggcgcccccctgcgtcatggaggggtgggcaacaagaccttgcactgccccaccgattgtttccgcaagcatccggaagccacatactctcggtgcggctccggtccctggattacacccaggtgtctggtcgactatccgtatagctttggcattacccttgtaccatcaactacaccgtgttcaaagtcaggatgtacgtgggaggggtcgagcataggctggaggctgcctgcaactggacgcggggcgaacgttgcaatctggaagacagggacaggtccgactcagcccgttgctgctgtccaccacacagtggcaagtccttccgtgttccttcacgaccctgccagccttgtccaccggcctcatccacctccaccagaacattgtggacgtgcagtacttatacgggtggggtcaagcatcgcgtcctgggccatcaagtgggagtacgtcgttctcctattccttctgctcgcagacgcgcgcgtctgctcctgcttgtggatgatgttactcatatcccaagcggaggcggctttggagaacctgtagtgctcaatgcagcatctttggccgggacacacggtcttgtgtccctcctcgtgttcttctgctttgcgtggtacctgaagggtaggtgggtgcccggagcggtctacgccctctacgggatgtgcctctcctcctgctcctattggcgttgccccagcgggcatatgcgttggacacggaggtggccgcgtcgtgtggcggcgctgttcttgtcgggttgatggcgctgactctgtcaccatattacaagcgctatgtcagctgtgcttatggtggcttcagtactttctgaccagagcagaagcgcaactgcacgtgtgggttccccctctcgacgtccgaggggggcgcgacgccgtcatcttactcatgtgtgctgtacgcccggcttggtgtttgacatcaccaagctgttgctggccgtcctcggacccctctggattctccaagccagtttgcttaaagtgccctactttgtgcgcgttcaaggccttctccggatctgcgcgctagcgcggaagatggcggggggcattacgtgcaaatggtcatcatcaagttgggggcgctcactggcacttatgtgtataaccatctcactcctcttcgggactgggcgcacaacggcctgcgagatctggctgtggctgtagagccagcgtcttctcccgaatggagaccaacctcatcacgtggggggcagacaccgccgcatgcggcgacatcatcaacggcttgcccgtctccgcccgcaggggccgggagatactgctcggaccagccgacggaatggtctccaagggtggaggttgctggcacccatcacggcatacgcccagcagacaaggggcctcctagggtgtataatcaccagcctaaccggccgggacaaaaatcaggtggagggtgaggtccagattgtgtcaatgctgcccaaacctttctggcaacgtgcatcaatggagtatgctggaccgtctaccacggggccggaacgaggaccatcgcatcacccaagggtcctgttatccagatgtacaccaatgtagataaagatctcgtgggttgcccgctcctcaaggttcccgttctttggcaccctgcacctgcggctcctcggacctttatctggtcacgaggcacgccgatgtcattcccgtgcgccggcggggtgatagcaggggcagcctgctttgccccggcccatttcctacttgaaaggctcctcggggggtccgctgttgtgccccgcggggcacgccgtgggcattttcagggccgcggtgtgcacccgtggagtggctaaggcagtggactttatccctgtagagaacctgagacaaccatgaggtccccggtgttcacggacaactcctctccaccagcagtaccccagagcttccaggtggcccacctgcatgctcccacaggcagcggcaagagcaccaaggtcccagctgcatcgcagctcagggctataaggtgctagtgctcaacccctctgttgctgcaacactaggcttcggtgcttatatgtccaaggcccatgggatcgaccctaacatcaggaccggggtgagaacaattaccactggcagccccatacgtactccacctacggcaagttccttgccgacggcgggtgctcagggggtgcttatgacataataatctgtgacgagtgccactccacggatgccacgtccatcttaggcatcggcaccgtccttgccaagcagagaccgcaggggcgaggcttgttgtgctcgccaccgctacccctccgggctccatcactgtgccccatcctaacatcgaggaggttgctctgtccaccaccggagagatccccttttatggcaaggctatcccctcgaagtaatcaagggggggaggcatctcatcttctgtcattcaaagaagaagtgtgacgagctcgctgcaaagctggttgcattgggcgtcaatgccgtggcctattaccgcggtcttgacgtgttgtcatcccgaccagcggcgatgttgtcgtcgtggcaactgatgctctcatgaccggctataccggcgacttcgactcggtgatagactgcaacacgtgtgtcacccagacagtcgatttcagccttgaccccaccttcacattgagacaaccacgcttccccaggatgctgtctcccgtacacaacggcggggcaggactggcagggggaagccaggcacctacaggtttgtggcaccgggggagcgcccctctggcatgttcgactgtctgtcctctgtgagtgctatgacgcgggctgtgcttggtatgagctcacgcccgccgagaccacagttaggctacgagcgtacatgaacaccccggggcttcccgtgtgccaggaccaccttgaattttgggagggcgttttacgggccttacccatatagatgcccacttcctatcccagacaaagcagagtggggagaaccttccttacctggtagcgtaccaagccaccgtgtgcgctagggctcaagcccctcccccgtcgtggaccagatgtggaagtgtttagtccgcctcaagcccaccctccatgggccaacacccctgctatacagattgggcgctgttcagaatgaagtcaccctgacacacccaatcacaaaatacatcatgacatgtatgtcggcga

SEQ ID NO: 294 - DNA, 5221 bp, Hepatitis C virus; identical to SEQ ID NO: 201

SEQ ID NO: 295 - DNA, 5222 bp, Hepatitis C virus
tcactcccctgtgaggaactactgtcttcacgcagaaagcgcctagccatggcgttagtatgagtgtcgtgcagcctccaggaccccccctcccgggagagccatagtggtctgcggaaccggtgagacaccggaattgccaggacgaccgggtcctttcttggataaacccgctcaatgcctggagatttgggcgtgcccccgcaagaccgctagccgagtagtgttgggtcgcgaaaggccttgtggtactgctgatagggtgcttgcgagtgccccgggaggtctcgtagaccgtgcaccatgagcacgaatcctaaacctcaaagaaaaaccaaacgtaacaccaaccgtcgcccacaggacgtcaagttcccgggtggcggtcagatcgtggtggagtttacttgttgccgcgcaggggccctagattgggtgtgcgcgcgacgaggaagacttccgagcggtcgcaacctcgaggcagacgtcagcctatccccaaggcacgtcggcccgagggcagacctgggctcagcccgggtacccctggcccctctatggcaatgagggctgtgggtgggcgggatggctcctgtctccccgtggctctcggcctagctggggcccctcagacccccggcgtaggtcgcgtaatttgggtaagtcatcgatacccttacatgcggcttcgccgacctcatggggtacataccgctcgtcggcgctcctcttgggggcgctgccagggccctggcgcatggcgtccgggttctggaagacggcgtgaacttgcaacagggaaccttcctggttgctctttctctatcttcctcctggctttgctctcttgcctgactgtgcctgcttcagcctaccaagtgcgcaactccacggggctttatcatgtcaccaatgattgccctaactcgagattgtgtacgaggcggccgatgctatcctgcacactccggggtgtgtcccttgcgtctacgagggtaacgcctcgaggtgttgggtggcgataacccccacggtggccaccagggatggcaaactcccacagtccagcttcgacgtcacatcgatctgcttgtcgggagcgctaccctttgttcggccctttacgtgggggacctgtgcgggtctgtctttcttgtcggccaactgttcaccttctctcccaggctccactggacaaccaggactgcaattgttccatctaccccggccatataacgggtcaccgtatggcgtgggacatgatgatgaactggtcccctacgacggcgctggtagtagctcagatgctccggatcccgcaagccacttggacatgatcgctggtgctcactggggagtcctagcgggcatagcgtatttctccatggtggggaactgggcgaaggtcctagtagtgctgctgctatttgccggcgtcgacgcggaaacccacgtcaccgggggagcgccggccgtaccatggctggatttactggtctctttacacaaggcgccaagcagagcatccagttggttaacaccaacggcagttggcacatcaacagaacggctttgaactgcaacgatagccttcgaccggctggatagcggggcttctctatcacaacaaattcaactcttcaggctgtcccgagaggttggccagctgccgaccccttaccgattttgcccagggctggggccctatcagctacgccaacggaagcggccccgacaacgcccctactgctggcactaccccccaaagccttgcggcattgtgcccgcacagagcgtatgtggcccggtatattgtttcactcctagccccgtggtggtgggaacgaccgacaggtcgggcggcctacctacggatggggtgcaaacgatacggacgtcttcgtccttaacaacaccaggccaccactgggcaattggttcggttgcacctggatgaactcaactggatacaccaaagtgtgcggggcgcccccctgtgccatagaggggtgggcaacaacaccttgcactgccccaccgattgtttccgcaagcatccggaagccacatactctcggtgcggctccggtccctggattacacccaggtgcctggtcaactacccgtatagctttggcattacccttgtaccatcaactacaccgtgttcaaggtcaggatgtacgtgggaggggtcgagcacaggctagaggctgcctgcaactggacgcggggcgaacgttgcagtctggaagacagggacaggtccgactcagcccgttgctgctgtccaccacacagtggcaggtccttccctgttccttcacgaccctgccagccttgtccaccggcctcatccacctccaccagaacattgtggacgtgcagtacttatacgggtggggtcaagtatcgcgtcctgggccatcaagtgggagtacgtcgttctcctattccttctgcttgcagacgcgcgcgtctgctcctgcttgtggatgatgttactcatatcccaagcggaggcggccttggagaacctgtagtgctcaatgcagcatctttggccgggacgcatggtcttgtgtccttcctcgtgttcttctgctttgcgtggtacctgaagggtaggtgggtgcccggagcggcctacgccctctacgggatgtgcctctcctcctgctcctgttggcgttgccccagcgggcatacgcgttggacacggaggtggccgcgtcgtgtggcggcgctgttcttgtcgggttgatggcgctgactctgtcaccacattacaagcgatatgtcagctgtgcttgtggtggcttcagtactttctgaccagagcagaagcgcaactacacgtgtgggttcccccccctcgacgtccgaggggggcgcgacgccgtcatcttactcatgtgtgctgtacgcccgacttggtgtttgacatcaccaagctgctgctggccgtcttcgggcccctttggattctccaggccagtttgcttaaagtaccctactttgtgcgcgttcaaggccttctccggatctgcgcgctagcgcggaagatggcgggggtcattacgtgcaaatggtcatcatcaaactaggggcgctcactggcacctatgtttataaccacctcactcctcttcgggactgggcgcacaacggcctgcgagatctggctgtggctgtagagccatcgtcttctcccgaatggagaccaacctcatcacgtggggggcagacaccgccgcgtgcggtgacatcatcaacggcttgcccgtctccgcccgtaggggccgggagatactgctcggaccagccgacggaatggtctccaggggtggaggttgctggcacccatcacggcatacgcccagcagacaaggggcctcctagggtgtataatcaccagcctaaccggccgggacaaaaaccaggtggagggtgaggtccagattgtgtcactgctgcccaaactttcctggcaacgtgcatcaatggagtatgctggaccgtctaccacggggccgggacgaggaccatcgcatcacccaagggtcctgtcatccagatgtacaccaatgtagacaaagatcttgtgggctgcccgctccccaaggttcccgttcattgacaccctgcacctgtggctcctcggacctttatctggtcacgaggcacgccgatgtcattcccgtgcgccggcggggtgatagcaggggcagcctgcttcgccccggcccatttcctacttgaaaggctcctcggggggtccgctgttgtgccccgcggggcatgccgtgggcatattcagggccgcagtgtgcacccgtggagtggctaaggcggtggactttatccctgtagagaaccagagacaaccatgaggtccccggtgttcacggacaactcctctccaccggcagtaccccagagcttccaggtggcccacctgcatgctcccacaggcagcggcaagagcaccaaggtcccggctgcaatgcagctcagggctataaggtgctagtgctcaacccctctgttgctgcaacactgggcttcggtgtttatatgtccaaggcccatgggatcgatcctaacatcaggaccggggtgagaacaattaccactggcagccccacacgtactccacctacggcaagttccttgccgacggcgggtgctcagggggtgcttatgacataataatctgtgacgagtgccactccacggatgccacatctatcttaggcatcggcaccgtccttaccaagcagagaccgcgggggcgaggcttgttgtgctcgccaccgctactcctccgggctccgtcaccgtgccccatcctaacatcgaggaggttgctctgtccaccaccggagagatccctttttatggcaaggctatcccctcgaagtaatcaagggggggaggcatctcatcttctgtcattcaaagaagaagtgtgacgagctcgccgcaaagctggttgcattgggcgtcaatgccgtggcctattaccgcggccttgacgtgctgtcatcccgaccagcggcgatgttgtcgtcgtggcaactgatgctctcatgaccggctataccggcgacttcgactcggtgatagactgcaatacgtgtgtcacccagacagttgatttcagccttgaccccaccttcacattgagacaaccacgcttccccaggatgctgtctcccgtacacaacgtcggggcaggactggcagggggaagccaggcacctacagatttgtggcaccgggggagcgcccctccggcatgttcgaccgtctgtcctctgtgagtgctatgacgcgggctgtgcttggtatgagctcacgcccgccgagactacagttaggctacgagcgtacatgaacaccccggggcttcccgtgtgccaggaccaccttgaattttgggagggcgctttacgggccttactcatatagatgcccacttcctatcccagacaaagcagagtggggagaaccttccttacctggtagcgtaccaagccaccgtgtgcgctagggctcaagcccctcccccatcggggaccagatgtggaagtgcttggtccgcctcaagcccaccctccatgggccaacacccctgctatacagattgggcgctgttcagaatgaagtcaccctgacacacccaatcacaaaatacatcatgacatgtatgtcggtga

SEQ ID NO: 296 - DNA, 4869 bp, Hepatitis C virus; identical to SEQ ID NO: 218

SEQ ID NO: 297 - DNA, 4869 bp, Hepatitis C virus
tcgcccacaggacgtcaagttcccgggtggcggtcagatcgttggtggagtttacttgttgccgcgcaggggccctagattgggtgtgcgcgcgacgaggaagacttccgagcggtcgcaacctcgagcagacgtcagcctatccccaaggcacgtcggcccgagggcaggacctgggctcagcccgggtacccctggcccctctatggcaatgagggctgtgggtgggcgggatggctcctgtctccccgtggtctcggcctagctggggcccctcagacccccggcgtaggtcgcgtaatttgggtaaggtcatcgatacccttacatgcggcttcgccgacctcatggggtacataccgctcgtcggcgctcctcttgggggcgctgccaggccctggcgcatggcgtccgggttctggaagacggcgtgaactatgcaacagggaaccttcctggttgctctttctctatcttcctcctggctttgctctcttgcctgactgtgcctgcttcagcctacaagtgcgcaactccacggggctttatcatgtcaccaatgattgccctaactcgagtattgtgtacgaggcggccgatgctatcctgcacactccggggtgtgtcccttgcgtctacgagggtaacgcctcgaggtgttggtggcgataacccccacggtggccaccagggatggcaaactccccacagtccagcttcgacgtcacatcgatctgcttgtcgggagcgctaccctttgttcggccctttacgtgggggacctgtgcggtctgtctttcttgtcggccaactattcaccttctctcccaggctccactggacaacgcaggactgcaattgttccatctaccccggccatataacgggtcaccgtatggcatgggacatgatgatgaactggtcccctacgcggcgctggtagtagctcagatgctccggatcccgcaagccatcttggacatgatcgctggtgctcactggggagtcctagcgggcatagcgtatttctccatggtggggaactgggcgaaggtcctgtagtgctgctgctatttgccggcgtcgacgcggaaacccacgtcaccgggggagctgccggccgtaccatggctggatttactggtctctttacacaaggcgccaagcagagcatccagttggttaacaccaacggcagtggcacatcaacagaacggctttgaactgcaacgatagccttcagaccggctggatagcggggcttctctatcacaacaaattcaactcttcaggctgtcccgagaggttggccagctgccgacccctaccgattttgcccagggctggggccctatcagttacgccaacggaagcgggcccgaccaacgcccctactgctggcactaccccccaaagccttgcggcattgtgcccgcacagagcgtatgtggcccggtatattgtttcctcctagccccgtggtggtgggaacgaccgacaggtcgggcgcgcctacctacggatggggtgcaaacgatacggacgtcttcgtccttaacaacaccaggccaccactgggcaattggttcggttgacctggatgaactcaactggatacaccaaagtgtgcggggcgcccccctgtgtcatcagaggggtgggcaataacaccttgcactgccccaccgattgtttccgcaagcatccggaaaccacatactctcggtgcggctccgtccctggattacacccaggtgcctggtcaactacccgtataggctttggcattacccttgtaccatcaactacaccgtgttcaaggtcaggatgtacgtgggaggggtcgagcataggctagaggcgcctgcaactggacgcggggcgaacgttgcagtctggaagacagggacaggtccgagctcagcccgttgctgctgtccaccacacagtggcaggtccttccctgttccttcacgaccctgccagccttgtccaccggcctctccacctccaccagaacattgtggacgtgcagtacttatacggggtggggtcaagtatcgcgtcctgggccatcaagtgggagtacgtcgttctcctattccttctgcttgcagacgcgcgcgtctgtcctgcttgtggatgatgttactcatatcccaagcggaggcggccttggagaacctcgtagtgctcaatgcagcatctttggccgggacgcatggtcttgtgtccttcctcgtgttcttctgctttgcgtggtacctgaaggtaggtgggtgcccggagcgacctacgccctctacgggatgtggcctctcctcctgctcctgttggcgttgccccagcgggcatacgcgttggacacggaggtggccgcgtcgtgtggcggcgctgtcttgtcgggttgatggcgctgactctgtcaccacattacaagcgatatgtcagctggtgcttgtggtggcttcagtactttctgaccagagcagaagcgcaactgcacgtgtgggttccccccctcgacgtccgagggggggcgacgccgtcatcttactcatgtgtgctgtacgcccgactttggtgtttgacatcaccaagctgctgctggccgtcttcgggcccctttggattctccaagccagtttgcttaaagtaccctacttgtgcgcgttcaaggccttctccggatctgcgcgctagcgcggaagatggcggggggtcattacgtgcaaatggtcatcatcaaactaggggcgctcactggcacctatgtttataaccacctcactcctcttcgggactggcgcacaacggcctgcgagatctggctgtggctgtagagccagtcgtcttctcccgaatggagaccaacctcatcacgtggggggcagacaccgccgcgtgcggtgacatcatcaacggcttgcccgttccgcccgtaggggccgggagatactgctcggaccagccgacggaatggtctccaaggggtggaggttgctggcacccatcacggcatacgcccagcagacaaggggcctcctagggtgtataatcaccagcctaaccggcgggacaaaaaccaggtggagggtgaggtccagattgtgtcaactgctgcccaaactttcctggcaacgtgcatcaacggagtatgctggaccgtctaccacggggccgggacgaggaccatcgcatccccaagggtcctgtcatccagatgtacaccaatgtagacaaagatcttgtgggctggcccgctccccaaggctcccgttcattgacaccctgcacctgcggctcctcggacctttatctggtcacgaggcacgccgatgtcttcccgtgcgccggcggggtgatagcaggggcagcctgctttcgccccggcctatttcctacttgaaaggctcctcggggggtccgctgttgtgccccgcggggcatgctgtgggcatattcagggcgcagtgtgcacccgtggagtggctaaggcggtggactttatccctgtagagaacctagagacaaccatgaggtccccggtgttcacggacaactcctctccaccggcagtaccccagagcttccaggtggcccacctgcatctcccacaggcagcggcaagagcaccaaggtcccggctgcatacgcagctcagggctataaggtgctagtgctcaacccctctgttgctgcaacactgggcttcggtgtttatatgtccaaggcccagggatcgatcctaacatcaggaccggggtgagaacaattaccactggcagccccatcacgtactccacctacggcaagttccttgccgacggcgggtgctcagggggtgcttatgacataataatctgtgacgagtgccacccacggatgccacatctatcttaggcatcggcaccgtccttgaccaagcagagaccgcgggggcgaggcttgttgtgctcgccaccgctacccctccgggctccgtcaccgtgccccatcctaacatgaggaggttgctctgtccaccaccggagagatccctttttatggcaaggctatccccctcgaagtaatcaagggggggaggcatctcatcttctgtcattcaaagaagaagtgtgacgagctcgccgcaaagctggttgcatgggcgtcaatgccgtggcctattaccgcggccttgacgtgtctgtcatcccgaccagcggcgatgttgtcgtcgtggcaactgatgctctcatgaccggctataccggcgacttcgactcggtgatgactgcaatacgtgtgtcacccagacagttgatttcagccttgaccccaccttcaccattgagacaaccacgcttccccaggatgctgtctcccgtacacaacgtcggggcaggactggcagggggaagccaggcacctacgatttgtggcaccgggggagcgcccctccggcatgttcgactcgtctgtcctctgtgagtgctatgacgcgggctgtgcttggtatgagctcacgcccgccgagactacagttaggctacgagcgtaatgaacaccccggggcttcccgtgtgccaggaccaccttgaattttgggagggcgtctttacgggccttactcatatagatgcccacttcctatcccagacaaagcagagtggggagaaccttccttacctggtagcgtacaagccaccgtgtgcgctagggctcaagcccctcccccatcgtgggaccagatgtggaagtgcttggtccgcctcaagcccaccctccatgggccaacacccctgctatacagattgggcgctgttcaaatgaagtcaccctgacacacccaatcacaaaatacatcatgacatgtatgtcggctga

SEQ ID NO: 298 - DNA, 4869 bp, Hepatitis C virus; identical to SEQ ID NO: 194

SEQ ID NO: 299 - DNA, 4869 bp, Hepatitis C virus; identical to SEQ ID NO: 194

SEQ ID NO: 300 - DNA, 4869 bp, Hepatitis C virus
tcgcccacaggacgtcaagttcccgggtggcggtcagatcgttggtggagtttacttgttgccgcgcaggggccctagattgggtgtgcgcgcgacgaggaagacttccgagcggtcgcaacctcgagtagacgtcagcctatccccaaggcacgtcggcccgagggcaggacctgggctcagcccgggtacccctggcccctctatggcaatgagggctgcgggtgggcgggatggctcctgtctccccgtggtctcggcctaactggggccccacagacccccggcgtaggtcgcgtaatttgggtaaggtcatcgatacccttacatgcggcttcgccgacctcatggggtacataccgctcgtcggcgcccctcttgggggcgctgccaggccctggcgcatggcgtccgggttctggaagacggcgtgaactatgcaacagggaaccttcctggttgctctttctctatcttccttctggctttgctctcttgcctgactgtgcctgcttcagcctacaagtgcgcaactccacggggctttatcatgtcaccaatgattgccctaactcgagtattgtgtacgaggcggacgatgctatcctgcacactccggggtgtgtcccttgcgtccgcgagggtaacggctcgaggtgttggtggcgataacccccacggtggccaccagggacggcaaactccccacagtgcagcttcgacgtcacatcgatctgctcgtcgggagcgctaccctttgttcggccctttacgtgggggacctgtgcggtctgtctttcttgtcggccaactgttcaccttctctcccaggcgccactggacaacgcaggactgcaattgttccatctatcccggccatataacgggtcaccgtatggcatgggacatgatgatgaactggtcccctacgcggcgctggtagtagctcagatgctccggatcccacaagccatcctggacatgatcgctggtgctcactggggagtcctggcgggcatagcgtatttctccatggtggggaactgggcgaaggtcctgtagtgctgctgctatttgccggcgtcgacgcgggaacccacgtcaccgggggcattgccgcccgtaccacgtctagaattgctggtctcttcaacccaggcgcccagcaggacatccagctggtcaacaccaacggcagtggcacatcaacagaacggccttgaactgtaacgatagccttcacaccggctggatagcggggcttttctatcgctacaaattcaactcttcaggctgtcccgagaggttggccagctgccgacccctaccgattttgcccagggctggggccctattagttacgccaacggaagcggccccgaccaacgcccctactgctggcactatcccccaaagccttgcggcattgtgcccgcacagagcgtgtgtggcccggtgtattgcttcctcccagccccgtggtggtgggaacgaccgacaaggcgggcgcgcctacctacagatggggtgcaaacgatacggacgtcttcgtccttaacaacaccaggccaccactgggcaattggttcggttgacctggatgaactcaactggatacaccaaagtgtgcggggcgcccccctgcgtcatcggaggggtgggcaacaagaccttgcactgccccaccgattgtttccgtaagcatccggaagccacatactctcggtgcggctccgtccctggattacacccaggtgtctggtcgactatccgtataggctttggcattacccttgtaccatcaactacaccgtgttcaaagtcaggatgtacgtgggaggggtcgagcataggctggaggcgcctgcaactggacgcggggcgaacgttgcaatctggaagacagggacaggtccgagctcagcccgttgctgctgtccaccacacagtggcaagtccttccgtgttccttcacgaccctgccagccttgtccaccggcctctccacctccaccagaacattgtggacgtgcagtacttatacggggtggggtcaagcatcgcgtcctgggccatcaagtgggagtacgtcgttctcctattccttctgctcgcagacgcgcgcgtctgtcctgcttgtggatgatgttactcatatcccaagcggaggcggctttggagaacctcgtagtgctcaatgcagcatctttggccgggacacacggtcttgtgtccctcctcgtgttcttctgctttgcgtggtacctgaaggtaggtgggtgcccggagcggtctacgccctctacgggatgtggcctctcctcctgctcctattggcgttgccccagcgggcatatgcgttggacacggaggtggccgcgtcgtgtggcggcgctgtcttgtcgggttgatggcgctgactctgtcaccatattacaagcgctatgtcagctggtgcttatggtggcttcagtactttctgaccagagcagaagcgcaactgcacgtgtgggttccccctctcgacgtccgagggggggcgacgccgtcatcttactcatgtgtgctgtacgcccggctttggtgtttgacatcaccaagctgctgctggccgtcctcggacccctctggattctccaagccagtttgcttaaagtgccctacttgtgcgcgttcaaggccttctccggatctgcgcgctagcgcggaagatggcggggggtcattacgtgcaaatggtcatcatcaagttgggggcgctcactggcacttatgtgtataaccatctcactcctcttcgggactggcgcacaacggcctgcgagatctggctgtggctgtagagccagtcgtcttctcccgaatggagaccaacctcatcacgtggggggcagacaccgccgcatgcggcgacatcatcaacggcttgcccgttccgcccgcaggggccgggagatactgctcggaccagccgacggaatggtctccaaggggtggaggttgctggcacccatcacggcatacgcccagcagacaaggggcctcctagggtgtataatcaccagcctaaccggcgggacaaaaatcaggtggagggtgaggtccagattgtgtcaactgctgcccaaacctttctggcaacgtgcatcaatggagtatgctggaccgtctaccacggggccggaacgaggaccatcgcatccccaagggtcctgttatccagatgtacaccaatgtagataaagatctcgtgggttggcccgctcctcaaggttcccgttctttggcaccctgcacctgcggctcctcggacctttatctggtcacgaggcacgccgatgtcttcccgtgcgccggcggggtgatagcaggggcagcctgctttcgccccggcccatttcctacttgaaaggctcctcggggggtccgctgttgtgccccgcggggcacgccgtgggcattttcagggcgcggtgtgcacccgtggagtggctaaggcagtggactttatccctgtagagaacctagagacaaccatgaggtccccggtgttcacggacaactcctctccaccagcagtaccccagagcttccaggtggcccacctgcatcccccacaggcagcggcaagagcaccaaggtcccagctgcatacgcagctcagggctataaggtgctagtgctcaacccctctgttgctgcaacactaggcttcggtgcttatatgtccaaggcccagggatcgaccctaacatcaggaccggggtgagaacaattaccactggcagccccatcacgtactccacctacggcaagttccttgccgacggcgggtgctcagggggtgcttatgacataataatctgtgacgagtgccacccacggatgccacgtccatcttaggcatcggcaccgtccttgaccaagcagagaccgcaggggcgaggcttgttgtgctcgccaccgctacccctccgggctccatcactgtgccccatcctaacatgaggaggttgctctgtccaccaccggagagatccccttttatggcaaggctatccccctcgaagtaatcaagggggggaggcatctcatcttctgtcattcaaagaagaagtgtgacgagctcgctgcaaagctggttgcatgggcgtcaatgccgtggcctattaccgcggtcttgacgtgtctgtcatcccgaccagcggcgatgttgtcgtcgtggcaactgatgctctcatgaccggctataccggcgacttcgactcggtgatgactgcaacacgtgtgtcacccagacagtcgatttcagccttgaccccaccttcaccattgagacaaccacgcttccccaggatgctgtctcccgtacacaacggcggggcaggactggcagggggaagccaggcacctacggtttgtggcaccgggggagcgcccctctggcatgttcgactcgtctgtcctctgtgagtgctatgacgcgggctgtgcttggtatgagctcacgcccgccgagaccacagttaggctacgagcgtaatgaacaccccggggcttcccgtgtgccaggaccaccttgaattttgggagggcgtctttacgggccttacccatatagatgcccacttcctatcccagacaaagcagagtggggagaaccttccttacctggtagcgtacaagccaccgtgtgcgctagggctcaagcccctcccccgtcgtgggaccagatgtggaagtgtttagtccgcctcaagcccaccctccatgggccaacacccctgctatacagattgggcgctgttcaaatgaagtcaccctgacacacccaatcacaaaatacatcatgacatgtatgtcggctga

SEQ ID NO: 301-317 - skipped (17 entries)

SEQ ID NO: 318 - DNA, 5221 bp, Hepatitis C virus; identical to SEQ ID NO: 201

SEQ ID NO: 319 - DNA, 5221 bp, Hepatitis C virus
tcactcccctgtgaggaactactgtcttcacgcagaaagcgtctagccatggcgttagtatgagtgtcgtgcagcctccaggaccccccctcccgggagagccatagtggtctgcggaaccggtgagacaccggaattgccaggacgaccgggtcctttcttggataaacccgctcaatgcctggagatttgggcgtgcccccgcaagactgctagccgagtagtgttgggtcgcgaaaggccttgtggtactgctgatagggtgcttgcgagtgccccgggaggtctcgtagaccgtgcaccatgagcacgaatcctaaacctcaaagaaaaaccaaacgtaacaccaaccgtcgcccacaggacgtcaagttcccgggtggcggtcagatcgtggtggagtttacttgttgccgcgcaggggccctagattgggtgtgcgcgcgacgaggaagacttccgagcggtcgcaacctcgaggtagacgtcagcctatccccaaggcacgtcggcccgagggcagacctgggctcagcccgggtacccctggcccctctatggcaatgagggctgcgggtgggcgggatggctcctgtctccccgtggctctcggcctaactggggccccacagacccccggcgtaggtcgcgtaatttgggtaagtcatcgatacccttacatgcggcttcgccgacctcatggggtacataccgctcgtcggcgcccctcttgggggcgctgccagggccctggcgcatggcgtccgggttctggaagacggcgtgaacttgcaacagggaaccttcctggttgctctttctctatcttccttctggctttgctctcttgcctgactgtgcctgcttcagcctaccaagtgcgcaactccacggggctttatcatgtcaccaatgattgccctaactcgagattgtgtacgaggcggacgatgctatcctgcacactccggggtgtgtcccttgcgtccgcgagggtaacggctcgaggtgttgggtggcgataacccccacggtggccaccagggacggcaaactcccacagtgcagcttcgacgtcacatcgatctgctcgtcgggagcgctaccctttgttcggccctttacgtgggggacctgtgcgggtctgtctttcttgtcggccaactgttcaccttctctcccaggcgccactggacaaccaggactgcaattgttccatctatcccggccatataacgggtcaccgtatggcatgggacatgatgatgaactggtcccctacgacggcgctggtagtagctcagatgctccggatcccacaagccacctggacatgatcgctggtgctcactggggagtcctggcgggcatagcgtatttctccatggtggggaactgggcgaaggtcctggtagtgctgctgctatttgccggcgtcgacgcgggaacccacgtcaccgggggcatgccgcccgtaccacgtctagaattgctggtctcttcaacccaggcgcccagcaggacatccagctggttaacaccaacggcagttggcacatcaacagaacggccttgaactgtaacgatagccttccaccggctggatagcggggcttttctatcgctacaaattcaactcttcaggctgtcccgagaggttggccagctgccgaccccttaccgattttgcccagggctggggccctattagttacgccaacggaagcggccccgacaacgcccctactgctggcactatcccccaaagccttgcggcattgtgcccgcacagagcgtgtgtggcccggtgtattgcttcactcccagccccgtggtggcgggaacgaccgacaaggcgggcggcctacctacagatggggtgcaaacgatacggacgtcttcgtccttaacaacaccaggccaccactgggcaattggttcggttgcacctggatgaactcaactggatacaccaaagtgtgcggggcgcccccctgcgtcatggaggggtgggcaacaagaccttgcactgccccaccgattgtttccgcaagcatccggaagccacatactctcggtgcggctccggtccctggattacacccaggtgtctggtcgactatccgtatagctttggcattacccttgtaccatcaactacaccgtgttcaaagtcaggatgtacgtgggaggggtcgagcataggctggaggctgcctgcaactggacgcggggcgaacgttgcaatctggaagacagggacaggtccgactcagcccgttgctgctgtccaccacacagtggcaagtccttccgtgttccttcacgaccctgccagccttgtccaccggcctcatccacctccaccagaacattgtggacgtgcagtacttatacgggtggggtcaagcatcgcgtcctgggccatcaagtgggagtacgtcgttctcctattccttctgctcgcagacgcgcgcgtctgctcctgcttgtggatgatgttactcatatcccaagcggaggcggctttggagaacctgtagtgctcaatgcagcatctttggccgggacacacggtcttgtgtccctcctcgtgttcttctgctttgcgtggtacctgaagggtaggtgggtgcccggagcggtctacgccctctacgggatgtgcctctcctcctgctcctattggcgttgccccagcgggcatatgcgttggacacggaggtggccgcgtcgtgtggcggcgctgttcttgtcgggttgatggcgctgactctgtcaccatattacaagcgctatgtcagctgtgcttatggtggcttcagtactttctgaccagagcagaagcgcaactgcacgtgtgggttccccctctcgacgtccgaggggggcgcgacgccgtcatcttactcatgtgtgctgtacgcccggcttggtgtttgacatcaccaagctgctgctggccgtcctcggacccctctggattctccaagccagtttgcttaaagtgccctactttgtgcgcgttcaaggccttctccggatctgcgcgctagcgcggaagatggcggggggcattacgtgcaaatggtcatcatcaagttgggggcgctcactggcacttatgtgtataaccatctcactcctcttcgggactgggcgcacaacggcctgcgagatctggctgtggctgtagagccagcgtcttctcccgaatggagaccaacctcatcacgtggggggcagacaccgccgcatgcggcgacatcatcaacggcttgcccgtctccgcccgcaggggccgggagatactgctcggaccagccgacggaatggtctccaagggtggaggttgctggcacccatcacggcatacgcccagcagacaaggggcctcctagggtgtataatcaccagcctaaccggccgggacaaaaatcaggtggagggtgaggtccagattgtgtcaatgctgcccaaacctttctggcaacgtgcatcaatggagtatgctggaccgtctaccacggggccggaacgaggaccatcgcatcacccaagggtcctgttatccagatgtacaccaatgtagataaagatctcgtgggttgcccgctcctcaaggttcccgttctttggcaccctgcacctgcggctcctcggacctttatctggtcacgaggcacgccgatgtcattcccgtgcgccggcggggtgatagcaggggcagcctgctttgccccggcccatttcctacttgaaaggctcctcggggggtccgctgttgtgccccgcggggcacgccgtgggcattttcagggccgcggtgtgcacccgtggagtggctaaggcagtggactttatccctgtagagaacctgagacaaccatgaggtccccggtgttcacggacaactcctctccaccagcagtaccccagagcttccaggtggcccacctgcatgctcccacaggcagcggcaagagcaccaaggtcccagctgcatcgcagctcagggctataaggtgctagtgctcaacccctctgttgctgcaacactaggcttcggtgcttatatgtccaaggcccatgggatcgaccctaacatcaggaccggggtgagaacaattaccactggcagccccatacgtactccacctacggcaagttccttgccgacggcgggtgctcagggggtgcttatgacataataatctgtgacgagtgccactccacggatgccacgtccatcttaggcatcggcaccgtccttgccaagcagagaccgcaggggcgaggcttgttgtgctcgccaccgctacccctccgggctccatcactgtgccccatcctaacatcgaggaggttgctctgtccaccaccggagagatccccttttatggcaaggctatcccctcgaagtaatcaagggggggaggcatctcatcttctgtcattcaaagaagaagtgtgacgagctcgctgcaaagctggttgcattgggcgtcaatgccgtggcctattaccgcggtcttgacgtgttgtcatcccgaccagcggcgatgttgtcgtcgtggcaactgatgctctcatgaccggctataccggcgacttcgactcggtgatagactgcaacacgtgtgtcacccagacagtcgatttcagccttgaccccaccttcacattgagacaaccacgcttccccaggatgctgtctcccgtacacaacggcggggcaggactggcagggggaagccaggcacctacaggtttgtggcaccgggggagcgcccctctggcatgttcgactgtctgtcctctgtgagtgctatgacgcgggctgtgcttggtatgagctcacgcccgccgagaccacagttaggctacgagcgtacatgaacaccccggggcttcccgtgtgccaggaccaccttgaattttgggagggcgttttacgggccttacccatatagatgcccacttcctatcccagacaaagcagagtggggagaaccttccttacctggtagcgtaccaagccaccgtgtgcgctagggctcaagcccctcccccgtcgtggaccagatgtggaagtgtttggtccgcctcaagcccaccctccatgggccaacacccctgctatacagattgggcgctgttcagaatgaagtcaccctgacacacccaatcacaaaatacatcatgacatgtatgtcggcga

SEQ ID NO: 320 - DNA, 4869 bp, Hepatitis C virus
tcgcccacaggacgtcaagttcccgggtggcggtcagatcgttggtggagtttacttgttgccgcgcaggggccctagattgggtgtgcgcgcgacgaggaagacttccgagcggtcgcaacctcgagtagacgtcagcctatccccaaggcacgtcggcccgagggcaggacctgggctcagcccgggtacccctggcccctctatggcaatgagggctgcgggtgggcgggatggctcctgtctccccgtggtctcggcctaactggggccccacagacccccggcgtaggtcgcgtaatttgggtaaggtcatcgatacccttacatgcggcttcgccgacctcatggggtacataccgctcgtcggcgcccctcttgggggcgctgccaggccctggcgcatggcgtccgggttctggaagacggcgtgaactatgcaacagggaaccttcctggttgctctttctctatcttccttctggctttgctctcttgcctgactgtgcctgcttcagcctacaagtgcgcaactccacggggctttatcatgtcaccaatgattgccctaactcgagtattgtgtacgaggcggacgatgctatcctgcacactccggggtgtgtcccttgcgtccgcgagggtaacggctcgaggtgttggtggcgataacccccacggtggccaccagggacggcaaactccccacagtgcagcttcgacgtcacatcgatctgctcgtcgggagcgctaccctttgttcggccctttacgtgggggacctgtgcggtctgtctttcttgtcggccaactgttcaccttctctcccaggcgccactggacaacgcaggactgcaattgttccatctatcccggccatataacgggtcaccgtatggcatgggacatgatgatgaactggtcccctacgcggcgctggtagtagctcagatgctccggatcccacaagccatcctggacatgatcgctggtgctcactggggagtcctggcgggcatagcgtatttctccatggtggggaactgggcgaaggtcctgtagtgctgctgctatttgccggcgtcgacgcgggaacccacgtcaccgggggcattgccgcccgtaccacgtctagaattgctggtctcttcaacccaggcgcccagcaggacatccagctggttaacaccaacggcagtggcacatcaacagaacggccttgaactgtaacgatagccttcacaccggctggatagcggggcttttctatcgctacaaattcaactcttcaggctgtcccgagaggttggccagctgccgacccctaccgattttgcccagggctggggccctattagttacgccaacggaagcggccccgaccaacgcccctactgctggcactatcccccaaagccttgcggcattgtgcccgcacagagcgtgtgtggcccggtgtattgcttcctcccagccccgtggtggtgggaacgaccgacaaggcgggcgcgcctacctacagatggggtgcaaacgatacggacgtcttcgtccttaacaacaccaggccaccactgggcaattggttcggttgacctggatgaactcaactggatacaccaaagtgtgcggggcgcccccctgcgtcatcggaggggtgggcaacaagaccttgcactgccccaccgattgtttccgcaagcatccggaagccacatactctcggtgcggctccgtccctggattacacccaggtgtctggtcgactatccgtataggctttggcattacccttgtaccatcaactacaccgtgttcaaagtcaggatgtacgtgggaggggtcgagcataggctggaggcgcctgcaactggacgcggggcgaacgttgcaatctggaagacagggacaggtccgagctcagcccgttgctgctgtccaccacacagtggcaagtccttccgtgttccttcacgaccctgccagccttgtccaccggcctctccacctccaccagaacattgtggacgtgcagtacttatacggggtggggtcaagcatcgcgtcctgggccatcaagtgggagtacgtcgttctcctattccttctgctcgcagacgcgcgcgtctgtcctgcttgtggatgatgttactcatatcccaagcggaggcggctttggagaacctcgtagtgctcaatgcagcatctttggccgggacacacggtcttgtgtccctcctcgtgttcttctgctttgcgtggtacctgaaggtaggtgggtgcccggagcggtctacgccctctacgggatgtggcctctcctcctgctcctattggcgttgccccagcgggcatatgcgttggacacggaggtggccgcgtcgtgtggcggcgctgtcttgtcgggttgatggcgctgactctgtcaccatattacaagcgctatgtcagctggtgcttatggtggcttcagtactttctgaccagagcagaagcgcaactgcacgtgtgggttccccctctcgacgtccgagggggggcgacgccgtcatcttactcatgtgtgctgtacgcccggctttggtgtttgacatcaccaagctgctgctggccgtcctcggacccctctggattctccaagccagtttgcttaaagtgccctacttgtgcgcgttcaaggccttctccggatctgcgcgctagcgcggaagatggcggggggtcattacgtgcaaatggtcatcatcaagttgggggcgctcactggcacttatgtgtataaccatctcactcctcttcgggactggcgcacaacggcctgcgagatctggctgtggctgtagagccagtcgtcttctcccgaatggagaccaacctcatcacgtggggggcagacaccgccgcatgcggcgacatcatcaacggcttgcccgttccgcccgcaggggccgggagatactgctcggaccagccgacggaatggtctccaaggggtggaggttgctggcacccatcacggcatacgcccagcagacaaggggcctcctagggtgtataatcaccagcctaaccggcgggacaaaaatcaggtggagggtgaggtccagattgtgtcaactgctgcccaaacctttctggcaacgtgcatcaatggagtatgctggaccgtctaccacggggccggaacgaggaccatcgcatccccaagggtcctgttatccagatgtacaccaatgtagataaagatctcgtgggttggcccgctcctcaaggttcccgttctttggcaccctgcacctgcggctcctcggacctttatctggtcacgaggcacgccgatgtcttcccgtgcgccggcggggtgatagcaggggcagcctgctttcgccccggcccatttcctacttgaaaggctcctcggggggtccgctgttgtgccccgcggggcacgccgtgggcattttcagggcgcggtgtgcacccgtggagtggctaaggcagtggactttatccctgtagagaacctagagacaaccatgaggtccccggtgttcacggacaactcctctccaccagcagtaccccagagcttccaggtggcccacctgcatctcccacaggcagcggcaagagcaccaaggtcccagctgcatacgcagctcagggctataaggtgctagtgctcaacccctctgttgctgcaacactaggcttcggtgcttatatgtccaaggcccagggatcgaccctaacatcaggaccggggtgagaacaattaccactggcagccccatcacgtactccacctacggcaagttccttgccgacggcgggtgctcagggggtgcttatgacataataatctgtgacgagtgccacccacggatgccacgtccatcttaggcatcggcaccgtccttgaccaagcagagaccgcaggggcgaggcttgttgtgctcgccaccgctacccctccgggctccatcactgtgccccatcctaacatgaggaggttgctctgtccaccaccggagagatccccttttatggcaaggctatccccctcgaagtaatcaagggggggaggcatctcatcttctgtcattcaaagaagaagtgtgacgagctcgctgcaaagctggttgcatgggcgtcaatgccgtggcctattaccgcggtcttgacgtgtctgtcatcccgaccagcggcgatgttgtcgtcgtggcaactgatgctctcatgaccggctataccggcgacttcgactcggtgatgactgcaacacgtgtgtcacccagacagtcgatttcagccttgaccctaccttcaccattgagacaaccacgcttccccaggatgctgtctcccgtacacaacggcggggcaggactggcagggggaagccaggcacctacggtttgtggcaccgggggagcgcccctctggcatgttcgactcgtctgtcctctgtgagtgctatgacgcgggctgtgcttggtatgagctcacgcccgccgagaccacagttaggctacgagcgtaatgaacaccccggggcttcccgtgtgccaggaccaccttgaattttgggagggcgtctttacgggccttacccatatagatgcccacttcctatcccagacaaagcagagtggggagaaccttccttacctggtagcgtacaagccaccgtgtgcgctagggctcaagcccctcccccgtcgtgggaccagatgtggaagtgtttagtccgcctcaagcccaccctccatgggccaacacccctgctatacagattgggcgctgttcaaatgaagtcaccctgacacacccaatcacaaaatacatcatgacatgtatgtcggctga

SEQ ID NO: 321 - DNA, 4869 bp, Hepatitis C virus
tcgcccacaggacgtcaagttcccgggtggcggtcagatcgttggtggagtttacttgttgccgcgcaggggccctagattgggtgtgcgcgcgacgaggaagacttccgagcggtcgcaacctcgagtagacgtcagcctatccccaaggcacgtcggcccgagggcaggacctgggctcagcccgggtacccttggcccctctatggcaatgagggctgcgggtgggcgggatggctcctgtctccccgtggtctcggcctaactggggccccacagacccccggcgtaggtcgcgtaatttgggtaaggtcatcgatacccttacatgcggcttcgccgacctcatggggtacataccgctcgtcggcgcccctcttgggggcgctgccaggccctggcgcatggcgtccgggttctggaagacggcgtgaactatgcaacagggaaccttcctggttgctctttctctatcttccttctggctttgctctcttgcctgactgtgcctgcttcagcctacaagtgcgcaactccacggggctttatcatgtcaccaatgattgccctaactcgagtattgtgtacgaggcggacgatgctatcctgcacactccggggtgtgtcccttgcgtccgcgagggtaacggctcgaggtgttggtggcgataacccccacggtggccaccagggacggcaaactccccacagtgcagcttcgacgtcacatcgatctgctcgtcgggagcgctaccctttgttcggccctttacgtgggggacctgtgcggtctgtctttcttgtcggccaactgttcaccttctctcccaggcgccactggacaacgcaggactgcaattgttccatctatcccggccatataacgggtcaccgtatggcatgggacatgatgatgaactggtcccctacgcggcgctggtagtagctcagatgctccggatcccacaagccatcctggacatgatcgctggtgctcactggggagtcctggcgggcatagcgtatttctccatggtggggaactgggcgaaggtcctgtagtgctgctgctatttgccggcgtcgacgcgggaacccacgtcaccgggggcattgccgcccgtaccacgtctagaattgctggtctcttcaacccaggcgcccagcaggacatccagctggttaacaccaacggcagtggcacatcaacagaacggccttgaactgtaacgatagccttcacaccggctggatagcggggcttttctatcgctacaaattcaactcttcaggctgtcccgagaggttggccagctgccgacccctaccgattttgcccagggctggggccctattagttacgccaacggaagcggccccgaccaacgcccctactgctggcactatcccccaaagccttgcggcattgtgcccgcacagagcgtgtgtggcccggtgtattgcttcctcccagccccgtggtggtgggaacgaccgacaaggcgggcgcgcctacctacagatggggtgcaaacgatacggacgtcttcgtccttaacaacaccaggccaccactgggcaattggttcggttgacctggatgaactcaactggatacaccaaagtgtgcggggcgcccccctgcgtcatcggaggggtgggcaacaagaccttgcactgccccaccgattgtttccgcaagcatccggaagccacatactctcggtgcggctccgtccctggattacacccaggtgtctggtcgactatccgtataggctttggcattacccttgtaccatcaactacaccgtgttcaaagtcaggatgtacgtgggaggggtcgagcataggctggaggcgcctgcaactggacgcggggcgaacgttgcaatctggaagacagggacaggtccgagctcagcccgttgctgctgtccaccacacagtggcaagtccttccgtgttccttcacgaccctgccagccttgtccaccggcctctccacctccaccagaacattgtggacgtgcagtacttatacggggtggggtcaagcatcgcgtcctgggccatcaagtgggagtacgtcgttctcctattccttctgctcgcagacgcgcgcgtctgtcctgcttgtggatgatgttactcatatcccaagcggaggcggctttggagaacctcgtagtgctcaatgcagcatctttggccgggacacacggtcttgtgtccctcctcgtgttcttctgctttgcgtggtacctgaaggtaggtgggtgcccggagcggtctacgccctctacgggatgtggcctctcctcctgctcctattggcgttgccccagcgggcatatgcgttggacacggaggtggccgcgtcgtgtggcggcgctgtcttgtcgggttgatggcgctgactctgtcaccatattacaagcgctatgtcagctggtgcttatggtggcttcagtactttctgaccagagcagaagcgcaactgcacgtgtgggttccccctctcgacgtccgagggggggcgacgccgtcatcttactcatgtgtgctgtacgcccggctttggtgtttgacatcaccaagctgctgctggccgtcctcggacccctctggattctccaagccagtttgcttaaagtgccctacttgtgcgcgttcaaggccttctccggatctgcgcgctagcgcggaagatggcggggggtcattacgtgcaaatggtcatcatcaagttgggggcgctcactggcacttatgtgtataaccatctcactcctcttcgggactggcgcacaacggcctgcgagatctggctgtggctgtagagccagtcgtcttctcccgaatggagaccaacctcatcacgtggggggcagacaccgccgcatgcggcgacatcatcaacggcttgcccgttccgcccgcaggggccgggagatactgctcggaccagccgacggaatggtctccaaggggtggaggttgctggcacccatcacggcatacgcccagcagacaaggggcctcctagggtgtataatcaccagcctaaccggcgggacaaaaatcaggtggagggtgaggtccagattgtgtcaactgctgcccaaacctttctggcaacgtgcatcaatggagtatgctggaccgtttaccacggggccggaacgaggaccatcgcatccccaagggtcctgttatccagatgtacaccaatgtagataaagatctcgtgggttggcccgctcctcaaggttcccgttctttggcaccctgcacctgcggctcctcggacctttatctggtcacgaggcacgccgatgtcttcccgtgcgccggcggggtgatagcaggggcagcctgctttcgccccggcccatttcctacttgaaaggctcctcggggggtccgctgttgtgccccgcggggcacgccgtgggcattttcagggcgcggtgtgcacccgtggagtggctaaggcagtggactttatccctgtagagaacctagagacaaccatgaggtccccggtgttcacggacaactcctctccaccagcagtaccccagagcttccaggtggcccacctgcatctcccacaggcagcggcaagagcaccaaggtcccagctgcatacgcagctcagggctataaggtgctagtgctcaacccctctgttgctgcaacactaggcttcggtgcttatatgtccaaggcccagggatcgaccctaacatcaggaccggggtgagaacaattaccactggcagccccatcacgtactccacctacggcaagttccttgccgacggcgggtgctcagggggtgcttatgacataataatctgtgacgagtgccacccacggatgccacgtccatcttaggcatcggcaccgtccttgaccaagcagagaccgcaggggcgaggcttgttgtgctcgccaccgctacccctccgggctccatcactgtgccccatcctaacatgaggaggttgctctgtccaccaccggagagatccccttttatggcaaggctatccccctcgaagtaatcaagggggggaggcatctcatcttctgtcattcaaagaagaagtgtgacgagctcgctgcaaagctggttgcatgggcgtcaatgccgtggcctattaccgcggtcttgacgtgtctgtcatcccgaccagcggcgatgttgtcgtcgtggcaactgatgctctcatgaccggctataccggcgacttcgactcggtgatgactgcaacacgtgtgtcacccagacagtcgatttcagccttgaccccaccttcaccattgagacaaccacgcttccccaggatgctgtctcccgtacacaacggcggggcaggactggcagggggaagccaggcacctacggtttgtggcaccgggggagcgcccctctggcatgttcgactcgtctgtcctctgtgagtgctatgacgcgggctgtgcttggtatgagctcacgcccgccgagaccacagttaggctacgagcgtaatgaacaccccggggcttcccgtgtgccaggaccaccttgaattttgggagggcgtctttacgggccttacccatatagatgcccacttcctatcccagacaaagcagagtggggagaaccttccttacctggtagcgtacaagccaccgtgtgcgctagggctcaagcccctcccccgtcgtgggaccagatgtggaagtgtttagtccgcctcaagcccaccctccatgggccaacacccctgctatacagattgggcgctgttcaaatgaagtcaccctgacacacccaatcacaaaatacatcatgacatgtatgtcggctga

SEQ ID NO: 322 - DNA, 4869 bp, Hepatitis C virus; identical to SEQ ID NO: 194

SEQ ID NO: 323 - DNA, 4869 bp, Hepatitis C virus
tcgcccacaggacgtcaagttcccgggtggcggtcagatcgttggtggagtttacttgttgccgcgcaggggccctagattgggtgtgcgcgcgacgaggaagacttccgagcggtcgcaacctcgagcagacgtcagcctatccccaaggcacgtcggcccgagggcaggacctgggctcagcccgggtacccctggcccctctatggcaatgagggctgtgggtgggcgggatggctcctgtctccccgtggtctcggcctagctggggcccctcagacccccggcgtaggtcgcgtaatttgggtaaagtcatcgatacccttacatgcggcttcgccgacctcatggggtacataccgctcgtcggcgctcctcttgggggcgctgccaggccctggcgcatggcgtccgggttctggaagacggcgtgaactatgcaacagggaaccttcctggttgctctttctctatcttcctcctggctttgctctcttgcctgactgtgcctgcttcagcctacaagtgcgcaactccacggggctttatcatgtcaccaatgattgccctaactcgagtattgtgtacgaggcggccgatgctatcctgcacactccggggtgtgtcccttgcgtctacgagggtaacgcctcgaggtgttggtggcgataacccccacggtggccaccagggatggcaaactccccacagtccagcttcgacgtcacatcgatctgcttgtcgggagcgctaccctttgttcggccctttacgtgggggacctgtgcggtctgtctttcttgtcggccaactattcaccttctctcccaggctccactggacaacgcaggactgcaattgttccatctaccccggccatataacgggtcaccgtatggcatgggacatgatgatgaactggtcccctacgcggcgctggtagtagctcagatgctccggatcccgcaagccatcttggacatgatcgctggtgctcactggggagtcctagcgggcatagcgtatttctccatggtggggaactgggcgaaggtcctgtagtgctgctgctatttgcctgcgtcgacgcggaaacccacgtcaccgggggagctgccggccgtaccatggctggatttactggtctctttacacaaggcgccaagcagagcatccagttggttaacaccaacggcagtggcacatcaacagaacggctttgaactgcaacgatagccttcagaccggctggatagcggggcttctctatcacaacaaattcaactcttcaggctgtcccgagaggttggccagctgccgacccctaccgattttgcccagggctggggccctatcagttacgccaacggaagcgggcccgaccaacgcccctactgctggcactaccccccaaagccttgcggcattgtgcccgcacagagcgtatgtggcccggtatattgtttcctcctagccccgtggtggtgggaacgaccgacaggtcgggcgcgcctacctacggatggggtgcaaacgatacggacgtcttcgtccttaacaacaccaggccaccactgggcaattggttcggttgacctggatgaactcaactggatacaccaaagtgtgcggggcgcccccctgtgtcatcagaggggtgggcaataacaccttgcactgccccaccgattgtttccgcaagcatccggaaaccacatactctcggtgcggctccgtccctggattacacccaggtgcctggtcaactacccgtataggctttggcattacccttgtaccatcaactacaccgtgttcaaggtcaggatgtacgtgggaggggtcgagcataggctagaggcgcctgcaactggacgcggggcgaacgttgcagtctggaagacagggacaggtccgagctcagcccgttgctgctgtccaccacacagtggcaggtccttccctgttccttcacgaccctgccagccttgtccaccggcctctccacctccaccagaacattgtggacgtgcagtacttatacggggtggggtcaagtatcgcgtcctgggccatcaagtgggagtacgtcgttctcctattccttctgcttgcagacgcgcgcgtctgtcctgcttgtggatgatgttactcatatcccaagcggaggcggccttggagaacctcgtagtgctcaatgcagcatctttggccgggacgcatggtcttgtgtccttcctcgtgttcttctgctttgcgtggtacctgaaggtaggtgggtgcccggagcgacctacgccctctacgggatgtggcctctcctcctgctcctgttggcgttgccccagcgggcatacgcgttggacacggaggtggccgcgtcgtgtggcggcgctgtcttgtcgggttgatggcgctgactctgtcaccacattacaagcgatatgtcagctggtgcttgtggtggcttcagtactttctgaccagagcagaagcgcaactgcacgtgtgggttccccccctcgacgtccgagggggggcgacgccgtcatcttactcatgtgtgctgtacgcccgactttggtgtttgacatcaccaagctgctgctggccgtcttcgggcccctttggattctccaagccagtttgcttaaagtaccctacttgtgcgcgttcaaggccttctccggatctgcgcgctagcgcggaagatggcggggggtcattacgtgcaaatggtcatcatcaaactaggggcgctcactggcacctatgtttataaccacctcactcctcttcgggactggcgcacaacggcctgcgagatctggctgtggctgtagagccagtcgtcttctcccgaatggagaccaacctcatcacgtggggggcagacaccgccgcgtgcggtgacatcatcaacggcttgcccgttccgcccgtaggggccgggagatactgctcggaccagccgacggaatggtctccaaggggtggaggttgctggcacccatcacggcatacgcccagcagacaaggggcctcctagggtgtataatcaccagcctaaccggcgggacaaaaaccaggtggagggtgaggtccagattgtgtcaactgctgcccaaactttcctggcaacgtgcatcaacggagtatgctggaccgtctaccacggggccgggacgaggaccatcgcatccccaagggtcctgtcatccagatgtacaccaatgtagacaaagatcttgtgggctggcccgctccccaaggctcccgttcattgacaccctgcacctgcggctcctcggacctttatctggtcacgaggcacgccgatgtcttcccgtgcgccggcggggtgatagcaggggcagcctgctttcgccccggcctatttcctacttgaaaggctcctcggggggtccgctgttgtgccccgcggggcatgctgtgggcatattcagggcgcagtgtgcacccgtggagtggctaaggcggtggactttatccctgtagagaacctagagacaaccatgaggtccccggtgttcacggacaactcctctccaccggcagtaccccagagcttccaggtggcccacctgcatctcccacaggcagcggcaagagcaccaaggtcccggctgcatacgcagctcagggctataaggtgctagtgctcaacccctctgttgctgcaacactgggcttcggtgtttatatgtccaaggcccagggatcgatcctaacatcaggaccggggtgagaacaattaccactggcagccccatcacgtactccacctacggcaagttccttgccgacggcgggtgctcagggggtgcttatgacataataatctgtgacgagtgccacccacggatgccacatctattttaggcatcggcaccgtccttgaccaagcagagaccgcgggggcgaggcttgttgtgctcgccaccgctacccctccgggctccgtcaccgtgccccatcctaacatgaggaggttgctctgtccaccaccggagagatccctttttatggcaaggctatccccctcgaagtaatcaagggggggaggcatctcatcttctgtcattcaaagaagaagtgtgacgagctcgccgcaaagctggttgcatgggcgtcaatgccgtggcctattaccgcggccttgacgtgtctgtcatcccgaccagcggcgatgttgtcgtcgtggcaactgatgctctcatgaccggctataccggcgacttcgactcggtgatgactgcaatacgtgtgtcacccagacagttgatttcagccttgaccccaccttcaccattgagacaaccacgcttccccaggatgctgtctcccgtacacaacgtcggggcaggactggcagggggaagccaggcacctacgatttgtggcaccgggggagcgcccctccggcatgttcgactcgtctgtcctctgtgagtgctatgacgcgggctgtgcttggtatgagctcacgcccgccgagactacagttaggctacgagcgtaatgaacaccccggggcttcccgtgtgccaggaccaccttgaattttgggagggcgtctttacgggccttactcatatagatgcccacttcctatcccagacaaagcagagtggggagaaccttccttacctggtagcgtacaagccaccgtgtgcgctagggctcaagcccctcccccatcgtgggaccagatgtggaagtgcttggtccgcctcaagcccaccctccatgggccaacacccctgctatacagattgggcgctgttcaaatgaagtcaccctgacacacccaatcacaaaatacatcatgacatgtatgtcggctga

SEQ ID NO: 324 - DNA, 4869 bp, Hepatitis C virus; identical to SEQ ID NO: 194

SEQ ID NO: 325 - DNA, 4869 bp, Hepatitis C virus; identical to SEQ ID NO: 194

SEQ ID NO: 326 - DNA, 5221 bp, Hepatitis C virus; identical to SEQ ID NO: 201

SEQ ID NO: 327 - DNA, 5221 bp, Hepatitis C virus
tcactcccctgtgaggaactactgtcttcacgcagaaagcgtctagccatggcgttagtatgagtgtcgtgcagcctccaggaccccccctcccgggagagccatagtggtctgcggaaccggtgagacaccggaattgccaggacgaccgggtcctttcttggataaacccgctcaatgcctggagatttgggcgtgcccccgcaagactgctagccgagtagtgttgggtcgcgaaaggccttgtggtactgctgatagggtgcttgcgagtgccccgggaggtctcgtagaccgtgcaccatgagcacgaatcctaaacctcaaagaaaaaccaaacgtaacaccaaccgtcgcccacaggacgtcaagttcccgggtggcggtcagatcgtggtggagtttacttgttgccgcgcaggggccctagattgggtgtgcgcgcgacgaggaagacttccgagcggtcgcaacctcgaggtagacgtcagcctatccccaaggcacgtcggcccgagggcagacctgggctcagcccgggtacccctggcccctctatggcaatgagggctgcgggtgggcgggatggctcctgtctccccgtggctctcggcctaactggggccccacagacccccggcgtaggtcgcgtaatttgggtaagtcatcgatacccttacatgcggcttcgccgacctcatggggtacataccgctcgtcggcgcccctcttgggggcgctgccagggccctggcgcatggcgtccgggttctggaagacggcgtgaacttgcaacagggaaccttcctggttgctctttctctatcttccttctggctttgctctcttgcctgactgtgcctgcttcagcctaccaagtgcgcaactccacggggctttatcatgtcaccaatgattgccctaactcgagattgtgtacgaggcggacgatgctatcctgcacactccggggtgtgtcccttgcgtccgcgagggtaacggctcgaggtgttgggtggcgataacccccacggtggccaccagggacggcaaactcccacagtgcagcttcgacgtcacatcgatctgctcgtcgggagcgctaccctttgttcggccctttacgtgggggacctgtgcgggtctgtctttcttgtcggccaactgttcaccttctctcccaggcgccactggacaaccaggactgcaattgttccatctatcccggccatataacgggtcaccgtatggcatgggacatgatgatgaactggtcccctacgacggcgctggtagtagctcagatgctccggatcccacaagccacctggacatgatcgctggtgctcactggggagtcctggcgggcatagcgtatttctccatggtggggaactgggcgaaggtcctggtagtgctgctgctatttgccggcgtcgacgcgggaacccacgtcaccgggggcatgccgcccgtaccacgtctagaattgctggtctcttcaacccaggcgcccagcaggacatccagctggttaacaccaacggcagttggcacatcaacagaacggccttgaactgtaacgatagccttccaccggctggatagcggggcttttatatcgctacaaattcaactcttcaggctgtcccgagaggttggccagctgccgaccccttaccgattttgcccagggctggggccctattagttacgccaacggaagcggccccgacaacgcccctactgctggcactatcccccaaagccttgcggcattgtgcccgcacagagcgtgtgtggcccggtgtattgcttcactcccagccccgtggtggtgggaacgaccgacaaggcgggcggcctacctacagatggggtgcaaacgatacggacgtcttcgtccttaacaacaccaggccaccactgggcaattggttcggttgcacctggatgaactcaactggatacaccaaagtgtgcggggcgcccccctgcgtcatggaggggtgggcaacaagaccttgcactgccccaccgattgtttccgcaagcatccggaagccacatactctcggtgcggctccggtccctggattacacccaggtgtctggtcgactatccgtatagctttggcattacccttgtaccatcaactacaccgtgttcaaagtcaggatgtacgtgggaggggtcgagcataggctggaggctgcctgcaactggacgcggggcgaacgttgcaatctggaagacagggacaggtccgactcagcccgttgctgctgtccaccacacagtggcaagtccttccgtgttccttcacgaccctgccagccttgtccaccggcctcatccacctccaccagaacattgtggacgtgcagtacttatacgggtggggtcaagcatcgcgtcctgggccatcaagtgggagtacgtcgttctcctattccttctgctcgcagacgcgcgcgtctgctcctgcttgtggatgatgttactcatatcccaagcggaggcggctttggagaacctgtagtgctcaatgcagcatctttggccgggacacacggtcttgtgtccctcctcgtgttcttctgctttgcgtggtacctgaagggtaggtgggtgcccggagcggtctacgccctctacgggatgtgcctctcctcctgctcctattggcgttgccccagcgggcatatgcgttggacacggaggtggccgcgtcgtgtggcggcgctgttcttgtcgggttgatggcgctgactctgtcaccatattacaagcgctatgtcagctgtgcttatggtggcttcagtactttctgaccagagcagaagcgcaactgcacgtgtgggttccccctctcgacgtccgaggggggcgcgacgccgtcatcttactcatgtgtgctgtacgcccggcttggtgtttgacatcaccaagctgctgctggccgtcctcggacccctctggattctccaagccagtttgcttaaagtgccctactttgtgcgcgttcaaggccttctccggatctgcgcgctagcgcggaagatggcggggggcattacgtgcaaatggtcatcatcaagttgggggcgctcactggcacttatgtgtataaccatctcactcctcttcgggactgggcgcacaacggcctgcgagatctggctgtggctgtagagccagcgtcttctcccgaatggagaccaacctcatcacgtggggggcagacaccgccgcatgcggcgacatcatcaacggcttgcccgtctccgcccgcaggggccgggagatactgctcggaccagccgacggaatggtctccaagggtggaggttgctggcacccatcacggcatacgcccagcagacaaggggcctcctagggtgtataatcaccagcctaaccggccgggacaaaaatcaggtggagggtgaggtccagattgtgtcaatgctgcccaaacctttctggcaacgtgcatcaatggagtatgctggaccgtctaccacggggccggaacgaggaccatcgcatcacccaagggtcctgttatccagatgtacaccaatgtagataaagatctcgtgggttgcccgctcctcaaggttcccgttctttggcaccctgcacctgcggctcctcggacctttatctggtcacgaggcacgccgatgtcattcccgtgcgccggcggggtgatagcaggggcagcctgctttgccccggcccatttcctacttgaaaggctcctcggggggtccgctgttgtgccccgcggggcacgccgtgggcattttcagggccgcggtgtgcacccgtggagtggctaaggcagtggactttatccctgtagagaacctgagacaaccatgaggtccccggtgttcacggacaactcctctccaccagcagtaccccagagcttccaggtggcccacctgcatgctcccacaggcagcggcaagagcaccaaggtcccagctgcatcgcagctcagggctataaggtgctagtgctcaacccctctgttgctgcaacactaggcttcggtgcttatatgtccaaggcccatgggatcgaccctaacatcaggaccggggtgagaacaattaccactggcagccccatacgtactccacctacggcaagttccttgccgacggcgggtgctcagggggtgcttatgacataataatctgtgacgagtgccactccacggatgccacgtccatcttaggcatcggcaccgtccttgccaagcagagaccgcaggggcgaggcttgttgtgctcgccaccgctacccctccgggctccatcactgtgccccatcctaacatcgaggaggttgctctgtccaccaccggagagatccccttttatggcaaggctatcccctcgaagtaatcaagggggggaggcatctcatcttctgtcattcaaagaagaagtgtgacgagctcgctgcaaagctggttgcattgggcgtcaatgccgtggcctattaccgcggtcttgacgtgttgtcatcccgaccagcggcgatgttgtcgtcgtggcaactgatgctctcatgaccggctataccggcgacttcgactcggtgatagactgcaacacgtgtgtcacccagacagtcgatttcagccttgaccccaccttcacattgagacaaccacgcttccccaggatgctgtctcccgtacacaacggcggggcaggactggcagggggaagccaggcacctacaggtttgtggcaccgggggagcgcccctctggcatgttcgactgtctgtcctctgtgagtgctatgacgcgggctgtgcttggtatgagctcacgcccgccgagaccacagttaggctacgagcgtacatgaacaccccggggcttcccgtgtgccaggaccaccttgaattttgggagggcgttttacgggccttacccatatagatgcccacttcctatcccagacaaagcagagtggggagaaccttccttacctggtagcgtaccaagccaccgtgtgcgctagggctcaagcccctcccccgtcgtggaccagatgtggaagtgtttagtccgcctcaagcccaccctccatgggccaacacccctgctatacagattgggcgctgttcagaatgaagtcaccctgacacacccaatcacaaaatacatcatgacatgtatgtcggcga

SEQ ID NO: 328 - DNA, 4869 bp, Hepatitis C virus
tcgcccacaggacgtcaagttcccgggtggcggtcagatcgttggtggagtttacttgttgccgcgcaggggccctagattgggtgtgcgcgcgacgaggaagacttccgagcggtcgcaacctcgagcagacgtcagcctatccccaaggcacgtcggcccgagggcaggacctgggctcagcccgggtacccctggcccctctatggcaatgagggctgtgggtgggcgggatggctcctgtctccccgtggtctcggcctagctggggcccctcagacccccggcgtaggtcgcgtaatttgggtaaagtcatcgatacccttacatgcggcttcgccgacctcatggggtacataccgctcgtcggcgctcctcttgggggcgctgccaggccctggcgcatggcgtccgggttctggaagacggcgtgaactatgcaacagggaaccttcctggttgctctttctctatcttcctcctggctttgctctcttgcctgactgtgcctgcttcagcctacaagtgcgcaactccacggggctttatcatgtcaccaatgattgccctaactcgagtattgtgtacgaggcggccgatgctatcctgcacactccggggtgtgtcccttgcgtctacgagggtaacgcctcgaggtgttggtggcgataacccccacggtggccaccagggatggcaaactccccacagtccagcttcgacgtcacatcgatctgcttgtcgggagcgctaccctttgttcggccctttacgtgggggacctgtgcggtctgtctttcttgtcggccaactgttcaccttctctcccaggctccactggacaacgcaggactgcaattgttccatctaccccggccatataacgggtcaccgtatggcgtgggacatgatgatgaactggtcccctacgcggcgctggtagtagctcagatgctccggatcccgcaagccatcttggacatgatcgctggtgctcactggggagtcctagcgggcatagcgtatttctccatggtggggaactgggcgaaggtcctgtagtgctgctgctatttgccggcgtcgacgcggaaacccacgtcaccgggggagctgccggccgtaccatggctggatttactggtctctttacacaaggcgccaagcagagcatccagttggttaacaccaacggcagtggcacatcaacagaacggctttgaactgcaacgatagccttcagaccggctggatagcggggcttctttatcacaacaaattcaactcttcaggctgtcccgagaggttggccagctgccgacccctaccgattttgcccagggctggggccctatcagctacgccaacggaagcggccccgaccaacgcccctactgctggcactaccccccaaagccttgcggcattgtgcccgcacagagcgtatgtggcccggtatattgtttcctcctagccccgtggtggtgggaacgaccgacaggtcgggcgcgcctacctacggatggggtgcaaacgatacggacgtcttcgtccttaacaacaccaggccaccactgggcaattggttcggttgacctggatgaactcaactggatacaccaaagtgtgcggggcgcccccctgtgccatcagaggggtgggcaacaacaccttgcactgccccaccgattgtttccgcaagcatccggaagccacatactctcggtgcggctccgtccctggattacacccaggtgcctggtcaactacccgtataggctttggcattacccttgtaccatcaactacaccgtgttcaaggtcaggatgtacgtgggaggggtcgagcacaggctagaggcgcctgcaactggacgcggggcgaacgttgcagtctggaagacagggacaggtccgagctcagcccgttgctgctgtccaccacacagtggcaggtccttccctgttccttcacgaccctgccagccttgtccaccggcctctccacctccaccagaacattgtggacgtgcagtacttatacggggtggggtcaagtatcgcgtcctgggccatcaagtgggagtacgtcgttctcctattccttctgcttgcagacgcgcgcgtctgtcctgcttgtggatgatgttactcatatcccaagcggaggcggccttggagaacctcgtagtgctcaatgcagcatctttggccgggacgcatggtcttgtgtccttcctcgtgttcttctgctttgcgtggtacctgaaggtaggtgggtgcccggagcggcctacgccctctacgggatgtggcctctcctcctgctcctgttggcgttgccccagcgggcatacgcgttggacacggaggtggccgcgtcgtgtggcggcgctgtcttgtcgggttgatggcgctgactctgtcaccacattacaagcgatatgtcagctggtgcttgtggtggcttcagtactttctgaccagagcagaagcgcaactacacgtgtgggttccccccctcgacgtccgagggggggcgacgccgtcatcttactcatgtgtgctgtacgcccgactttggtgtttgacatcaccaagctgctgctggccgtcttcgggcccctttggattctccaggccagtttgcttaaagtaccctacttgtgcgcgttcaaggccttctccggatctgcgcgctagcgcggaagatggcggggggtcattacgtgcaaatggtcatcatcaaactaggggcgctcactggcacctatgtttataaccacctcactcctcttcgggactggcgcacaacggcctgcgagatctggctgtggctgtagagccagtcgtcttctcccgaatggagaccaacctcatcacgtggggggcagacaccgccgcgtgcggtgacatcatcaacggcttgcccgttccgcccgtaggggccgggagatactgctcggaccagccgacggaatggtctccaaggggtggaggttgctggcacccatcacggcatacgcccagcagacaaggggcctcctagggtgtataatcaccagcctaaccggcgggacaaaaaccaggtggagggtgaggtccagattgtgtcaactgctgcccaaactttcctggcaacgtgcatcaatggagtatgctggaccgtctaccacggggccgggacgaggaccatcgcatccccaagggtcctgtcatccagatgtacaccaatgtagacaaagatcttgtgggctggcccgctccccaaggttcccgttcattgacaccctgcacctgtggctcctcggacctttatctggtcacgaggcacgccgatgtcttcccgtgcgccggcggggtgatagcaggggcagcctgctttcgccccggcccatttcctacttgaaaggctcctcggggggtccgctgttgtgccccgcggggcatgctgtgggcatattcagggcgcagtgtgcacccgtggagtggctaaggcggtggactttatccctgtagagaacctagagacaaccatgaggtccccggtgttcacggacaactcctctccaccggcagtaccccagagcttccaggtggcccacctgcatctcccacaggcagcggcaagagcaccaaggtcccggctgcatatgcagctcagggctataaggtgctagtgctcaacccctctgttgctgcaacactgggcttcggtgtttatatgtccaaggcccagggatcgatcctaacatcaggaccggggtgagaacaattaccactggcagccccatcacgtactccacctacggcaagttccttgccgacggcgggtgctcagggggtgcttatgacataataatctgtgacgagtgccacccacggatgccacatctatcttaggcatcggcaccgtccttgaccaagcagagaccgcgggggcgaggcttgttgtgctcgccaccgctactcctccgggctccgtcaccgtgccccatcctaacatgaggaggttgctctgtccaccaccggagagatccctttttatggcaaggctatccccctcgaagtaatcaagggggggaggcatctcatcttctgtcattcaaagaagaagtgtgacgagctcgccgcaaagctggttgcatgggcgtcaatgccgtggcctattaccgcggccttgacgtgtctgtcatcccgaccagcggcgatgttgtcgtcgtggcaactgatgctctcatgaccggctataccggcgacttcgactcggtgatgactgcaatacgtgtgtcacccagacagttgatttcagccttgaccccaccttcaccattgagacaaccacgcttccccaggatgctgtctcccgtacacaacgtcggggcaggactggcagggggaagccaggcacctacgatttgtggcaccgggggagcgcccctccggcatgttcgactcgtctgtcctctgtgagtgctatgacgcgggctgtgcttggtatgagctcacgcccgccgagactacagttaggctacgagcgtaatgaacaccccggggcttcccgtgtgccaggaccaccttgaattttgggagggcgtctttacgggccttactcatatagatgcccacttcctatcccagacaaagcagagtggggagaaccttccttacctggtagcgtacaagccaccgtgtgcgctagggctcaagcccctcccccatcgtgggaccagatgtggaagtgcttggtccgcctcaagcccaccctccatgggccaacacccctgctatacagattgggcgctgttcaaatgaagtcaccctgacacacccaatcacaaaatacatcatgacatgtatgtcggctga

SEQ ID NO: 329 - DNA, 4869 bp, Hepatitis C virus
tcgcccacaggacgtcaagttcccgggtggcggtcagatcgttggtggagtttacttgttgccgcgcaggggccctagattgggtgtgcgcgcgacgaggaagacttccgagcggtcgcaacctcgagtagacgtcagcctatccccaaggcacgtcggcccgagggcaggacctgggctcagcccgggtacccctggcccctctatggcaatgagggctgcgggtgggcgggatggctcctgtctccccgtggtctcggcctaactggggccccacagacccccggcgtaggtcgcgtaatttgggtaaggtcatcgatacccttacatgcggcttcgccgacctcatggggtacataccgctcgtcggcgcccctcttgggggcgctgccaggccctggcgcatggcgtccgggttctggaagacggcgtgaactatgcaacagggaaccttcctggttgctctttctctatcttccttctggctttgctctcttgcctgactgtgcctgcttcagcctacaagtgcgcaactccacggggctttatcatgtcaccaatgattgccctaactcgagtattgtgtacgaggcggacgatgctatcctgcacactccggggtgtgtcccttgcgtccgcgagggtaacggctcgaggtgttggtggcgataacccccacggtggccaccagggacggcaaactccccacagtgcagcttcgacgtcacatcgatctgctcgtcgggagcgctaccctttgttcggccctttacgtgggggacctgtgcggtctgtctttcttgtcggccaactgttcaccttctctcccaggcgccactggacaacgcaggactgcaattgttccatctatcccggccatataacgggtcaccgtatggcatgggacatgatgatgaactggtcccctacgcggcgctggtagtagctcagatgctccggatcccacaagccatcctggacatgatcgctggtgctcactggggagtcctggcgggcatagcgtatttctccatggtggggaactgggcgaaggtcctgtggtgctgctgctatttgccggcgtcgacgcgggaacccacgtcaccgggggcattgccgcccgtaccacgtctagaattgctggtctcttcaacccaggcgcccagcaggacatccagctggttaacaccaacggcagtggcacatcaacagaacggccttgaactgtaacgatagccttcacaccggctggatagcggggcttttctatcgctacaaattcaactcttcaggctgtcccgagaggttggccagctgccgacccctaccgattttgcccagggctggggccctattagttacgccaacggaagcggccccgaccaacgcccctactgctggcactatcccccaaagccttgcggcattgtgcccgcacagagcgtgtgtggcccggtgtattgcttcctcccagccccgtggtggtgggaacgaccgacaaggcgggcgcgcctacctacagatggggtgcaaacgatacggacgtcttcgtccttaacaacaccaggccaccactgggcaattggttcggttgacctggatgaattcaactggatacaccaaagtgtgcggggcgcccccctgcgtcatcggaggggtgggcaacaagaccttgcactgccccaccgattgtttccgcaagcatccggaagccacatactctcggtgcggctccgtccctggattacacccaggtgtctggtcgactatccgtataggctttggcattacccttgtaccatcaactacaccgtgttcaaagtcaggatgtacgtgggaggggtcgagcataggctggaggcgcctgcaactggacgcggggcgaacgttgcaatctggaagacagggacaggtccgagctcagcccgttgctgctgtccaccacacagtggcaagtccttccgtgttccttcacgaccctgccagccttgtccaccggcctctccacctccaccagaacattgtggacgtgcagtacttatacggggtggggtcaagcatcgcgtcctgggccatcaagtgggagtacgtcgttctcctattccttctgctcgcagacgcgcgcgtctgtcctgcttgtggatgatgttactcatatcccaagcggaggcggctttggagaacctcgtagtgctcaatgcagcatctttggccgggacacacggtcttgtgtccctcctcgtgttcttctgctttgcgtggtacctgaaggtaggtgggtgcccggagcggtctacgccctctacgggatgtggcctctcctcctgctcctattggcgttgccccagcgggcatatgcgttggacacggaggtggccgcgtcgtgtggcggcgctgtcttgtcgggttgatggcgctgactctgtcaccatattacaagcgctatgtcagctggtgcttatggtggcttcagtactttctgaccagagcagaagcgcaactgcacgtgtgggttccccctctcgacgtccgagggggggcgacgccgtcatcttactcatgtgtgctgtacgcccggctttggtgtttgacatcaccaagctgctgctggccgtcctcggacccctctggattctccaagccagtttgcttaaagtgccctacttgtgcgcgttcaaggccttctccggatctgcgcgctagcgcggaagatggcggggggtcattacgtgcaaatggtcatcatcaagttgggggcgctcactggcacttatgtgtataaccatctcactcctcttcgggactggcgcacaacggcctgcgagatctggctgtggctgtagagccagtcgtcttctcccgaatggagaccaacctcatcacgtggggggcagacaccgccgcatgcggcgacatcatcaacggcttgcccgttccgcccgcaggggccgggagatactgctcggaccagccgacggaatggtctccaaggggtggaggttgctggcacccatcacggcatacgcccagcagacaaggggcctcctagggtgtataatcaccagcctaaccggcgggacaaaaatcaggtggagggtgaggtccagattgtgtcaactgctgcccaaacctttctggcaacgtgcatcaatggagtatgctggaccgtctaccacggggccggaacgaggaccatcgcatccccaagggtcctgttatccagatgtacaccaatgtagataaagatctcgtgggttggcccgctcctcaaggttcccgttctttggcaccctgcacctgcggctcctcggacctttatctggtcacgaggcacgccgatgtcttcccgtgcgccggcggggtgatagcaggggcagcctgctttcgccccggcccatttcctacttgaaaggctcctcggggggtccgctgttgtgccccgcggggcacgccgtgggcattttcagggcgcggtgtgcacccgtggagtggctaaggcagtggactttatccctgtagagaacctagagacaaccatgaggtccccggtgttcacggacaactcctctccaccagcagtaccccagagcttccaggtggcccacctgcatctcccacaggcagcggcaagagcaccaaggtcccagctgcatacgcagctcagggctataaggtgctagtgctcaacccctctgttgctgcaacactaggcttcggtgcttatatgtccaaggcccagggatcgaccctaacatcaggaccggggtgagaacaattaccactggcagccccatcacgtactccacctacggcaagttccttgccgacggcgggtgctcagggggtgcttatgacataataatctgtgacgagtgccacccacggatgccacgtccatcttaggcatcggcaccgtccttgaccaagcagagaccgcaggggcgaggcttgttgtgctcgccaccgctacccctccgggctccatcactgtgccccatcctaacatgaggaggttgctctgtccaccaccggagagatccccttttatggcaaggctatccccctcgaagtaatcaagggggggaggcatctcatcttctgtcattcaaagaagaagtgtgacgagctcgctgcaaagctggttgcatgggcgtcaatgccgtggcctattaccgcggtcttgacgtgtctgtcatcccgaccagcggcgatgttgtcgtcgtggcaactgatgctctcatgaccggctataccggcgacttcgactcggtgatgactgcaacacgtgtgtcacccagacagtcgatttcagccttgaccccaccttcaccattgagacaaccacgcttccccaggatgctgtctcccgtacacaacggcggggcaggactggcagggggaagccaggcacctacggtttgtggcaccgggggagcgcccctctggcatgttcgactcgtctgtcctctgtgagtgctatgacgcgggctgtgcttggtatgagctcacgcccgccgagaccacagttaggctacgagcgtaatgaacaccccggggcttcccgtgtgccaggaccaccttgaattttgggagggcgtctttacgggccttacccatatagatgcccacttcctatcccagacaaagcagagtggggagaaccttccttacctggtagcgtacaagccaccgtgtgcgctagggctcaagcccctcccccgtcgtgggaccagatgtggaagtgtttagtccgcctcaagcccaccctccatgggccaacacccctgctatacagattgggcgctgttcaaatgaagtcaccctgacacacccaatcacaaaatacatcatgacatgtatgtcggctga

SEQ ID NO: 330 - DNA, 4869 bp, Hepatitis C virus; identical to SEQ ID NO: 194

SEQ ID NO: 331 - DNA, 4869 bp, Hepatitis C virus; identical to SEQ ID NO: 195

SEQ ID NO: 332 - DNA, 4869 bp, Hepatitis C virus; identical to SEQ ID NO: 194

SEQ ID NO: 333 - DNA, 4869 bp, Hepatitis C virus
tcgcccacaggacgtcaagttcccgggtggcggtcagatcgttggtggagtttacttgttgccgcgcaggggccctagattgggtgtgcgcgcgacgaggaagacttccgagcggtcgcaacctcgagtagacgtcagcctatccccaaggcacgtcggcccgagggcaggacctgggctcagcccgggtacccctggcccctctatggcaatgagggctgcgggtgggcgggatggctcctgtctccccgtggtctcggcctaactggggccccacagacccccggcgtaggtcgcgtaatttgggtaaggtcatcgatacccttacatgcggcttcgccgacctcatggggtacataccgctcgtcggcgcccctcttgggggcgctgccaggccctggcgcatggcgtccgggttctggaagacggcgtgaactatgcaacagggaaccttcctggttgctctttctctatcttccttctggctttgctctcttgcctgactgtgcctgcttcagcctacaagtgcgcaactccacggggctttatcatgtcaccaatgattgccctaactcgagtattgtgtacgaggcggacgatgctatcctgcacactccggggtgtgtcccttgcgtccgcgagggtaacggctcgaggtgttggtggcgataacccccacggtggccaccagggacggcaaactccccacagtgcagcttcgacgtcacatcgatctgctcgtcgggagcgctaccctttgttcggccctttacgtgggggacctgtgcggtctgtctttcttgtcggccaactgttcaccttctctcccaggcgccactggacaacgcaggactgcaattgttccatctatcccggccatataacgggtcaccgtatggcatgggacatgatgatgaactggtcccctacgcggcgctggtagtagctcagatgctccggatcccacaagccatcctggacatgatcgctggtgctcactggggagtcctggcgggcatagcgtatttctccatggtggggaactgggcgaaggtcctgtagtgctgctgctatttgccggcgtcgacgcgggaacccacgtcaccgggggcattgccgcccgtaccacgtctagaattgctggtctcttcaacccaggcgcccagcaggacatccagctggttaacaccaacggcagtggcacatcaacagaacggccttgaactgtaacgatagccttcacaccggctggatagcggggcttttctatcgctacaaattcaactcttcaggctgtcccgagaggttggccagctgccgacccctaccgattttgcccagggctggggccctattagttacgccaacggaagcggccccgaccaacgcccctactgctggcactatcccccaaagccttgcggcattgtgcccgcacagagcgtgtgtggcccggtgtattgcttcctcccagccccgtggtggtgggaacgaccgacaaggcgggcgcgcctacctacagatggggtgcaaacgatacggacgtcttcgtccttaacaacaccaggccaccactgggcaattggttcggttgacctggatgaactcaactggatacaccaaagtgtgcggggcgcccccctgcgtcatcggaggggtgggcaacaagaccttgcactgccccaccgattgtttccgcaagcatccggaagccacatactctcggtgcggctccgtccctggattacacccaggtgtctggtcgactatccgtataggctttggcattacccttgtaccatcaactacaccgtgttcaaagtcaggatgtacgtgggaggggtcgagcataggctggaggcgcctgcaactggacgcggggcgaacgttgcaatctggaagacagggacaggtccgagctcagcccgttgctgctgtccaccacacagtggcaagtccttccgtgttccttcacgaccctgccagccttgtccaccggcctctccacctccaccagaacattgtggacgtgcagtacttatacggggtggggtcaagcatcgcgtcctgggccatcaagtgggagtacgtcgttctcctattccttctgctcgcagacgcgcgcgtctgtcctgcttgtggatgatgttactcatatcccaagcggaggcggctttggagaacctcgtagtgctcgatgcagcatctttggccgggacacacggtcttgtgtccctcctcgtgttcttctgctttgcgtggtacctgaaggtaggtgggtgcccggagcggtctacgccctctacgggatgtggcctctcctcctgctcctattggcgttgccccagcgggcatatgcgttggacacggaggtggccgcgtcgtgtggcggcgctgtcttgtcgggttgatggcgctgactctgtcaccatattacaagcgctatgtcagctggtgcttatggtggcttcagtactttctgaccagagcagaagcgcaactgcacgtgtgggttccccctctcgacgtccgagggggggcgacgccgtcatcttactcatgtgtgctgtacgcccggctttggtgtttgacatcaccaagctgctgctggccgtcctcggacccctctggattctccaagccagtttgcttaaagtgccctacttgtgcgcgttcaaggccttctccggatctgcgcgctagcgcggaagatggcggggggtcatcacgtgcaaatggtcatcatcaagttgggggcgctcactggcacttatgtgtataaccatctcactcctcttcgggactggcgcacaacggcctgcgagatctggctgtggctgtagagccagtcgtcttctcccgaatggagaccaacctcatcacgtggggggcagacaccgccgcatgcggcgacatcatcaacggcttgcccgttccgcccgcaggggccgggagatactgctcggaccagccgacggaatggtctccaaggggtggaggttgctggcacccatcacggcatacgcccagcagacaaggggcctcctagggtgtataatcaccagcctaaccggcgggacaaaaatcaggtggagggtgaggtccagattgtgtcaactgctgcccaaacctttctggcaacgtgcatcaatggagtatgctggaccgtctaccacggggccggaacgaggaccatcgcatccccaagggtcctgttatccagatgtacaccaatgtagataaagatctcgtgggttggcccgctcctcaaggttcccgttctttggcaccctgcacctgcggctcctcggacctttatctggtcacgaggcacgccgatgtcttcccgtgcgccggcggggtgatagcaggggcagcctgctttcgccccggcccatttcctacttgaaaggctcctcggggggtccgctgttgtgccccgcggggcacgccgtgggcattttcagggcgcggtgtgcacccgtggagtggctaaggcagtggactttatccctgtagagaacctagagacaaccatgaggtccccggtgttcacggacaactcctctccaccagcagtaccccagagcttccaggtggcccacctgcatctcccacaggcagcggcaagagcaccaaggtcccagctgcatacgcagctcagggctataaggtgctagtgctcaacccctctgttgctgcaacactaggcttcggtgcttatatgtccaaggcccagggatcgaccctaacatcaggaccggggtgagaacaattaccactggcagccccatcacgtactccacctacggcaagttccttgccgacggcgggtgctcagggggtgcttatgacataataatctgtgacgagtgccacccacggatgccacgtccatcttaggcatcggcaccgtccttgaccaagcagagaccgcaggggcgaggcttgttgtgctcgccaccgctacccctccgggctccatcactgtgccccatcctaacatgaggaggttgctctgtccaccaccggagagatccccttttatggcaaggctatccccctcgaagtaatcaagggggggaggcatctcatcttctgtcattcaaagaagaagtgtgacgagctcgctgcaaagctggttgcatgggcgtcaatgccgtggcctattaccgcggtcttgacgtgtctgtcatcccgaccagcggcgatgttgtcgtcgtggcaactgatgctctcatgaccggctataccggcgacttcgactcggtgatgactgcaacacgtgtgtcacccagacagtcgatttcagccttgaccccaccttcaccattgagacaaccacgcttccccaggatgctgtctcccgtacacaacggcggggcaggactggcagggggaagccaggcacctacggtttgtggcaccgggggagcgcccctctggcatgttcgactcgtctgtcctctgtgagtgctatgacgcgggctgtgcttggtatgagctcacgcccgccgagaccacagttaggctacgagcgtaatgaacaccccggggcttcccgtgtgccaggaccaccttgaattttgggagggcgtctttacgggccttacccatatagatgcccacttcctatcccagacaaagcagagtggggagaaccttccttacctggtagcgtacaagccaccgtgtgcgctagggctcaagcccctcccccgtcgtgggaccagatgtggaagtgtttagtccgcctcaagcccaccctccatgggccaacacccctgctatacagattgggcgctgttcaaatgaagtcaccctgacacacccaatcacaaaatacatcatgacatgtatgtcggctga

SEQ ID NO: 334 - DNA, 4869 bp, Hepatitis C virus
tcgcccacaggacgtcaagttcccgggtggcggtcagatcgttggtggagtttacttgttgccgcgcaggggccctagattgggtgtgcgcgcgacgaggaagacttccgagcggtcgcaacctcgagtagacgtcagcctatccccaaggcacgtcggcccgagggcaggacctgggctcagcccgggtacccctggcccctctatggcaatgagggctgcgggtgggcgggatggctcctgtctccccgtggtctcggcctaactggggccccacagacccccggcgtaggtcgcgtaatttgggtagggtcatcgatacccttacatgcggcttcgccgacctcatggggtacataccgctcgtcggcgcccctcttgggggcgctgccaggccctggcgcatggcgtccgggttctggaagacggcgtgaactatgcaacagggaaccttcctggttgctctttctctatcttccttctggctttgctctcttgcctgactgtgcctgcttcagcctacaagtgcgcaactccacggggctttatcatgtcaccaatgattgccctaactcgagtattgtgtacgaggcggacgatgctatcctgcacactccggggtgtgtcccttgcgtccgcgagggtaacggctcgaggtgttggtggcgataacccccacggtggccaccagggacggcaaactccccacagtgcagcttcgacgtcacatcgatctgctcgtcgggagcgctaccctttgttcggccctttacgtgggggacctgtgcggtctgtctttcttgtcggccaactgttcaccttctctcccaggcgccactggacaacgcaggactgcaattgttccatctatcccggccatataacgggtcaccgtatggcatgggacatgatgatgaactggtcccctacgcggcgctggtagtagctcagatgctccggatcccacaagccatcctggacatgatcgctggtgctcactggggagtcctggcgggcatagcgtatttctccatggtggggaactgggcgaaggtcctgtagtgctgctgctatttgccggcgtcgacgcgggaacccacgtcaccgggggcattgccgcccgtaccacgtctagaattgctggtctcttcaacccaggcgcccagcaggacatccagctggttaacaccaacggcagtggcacatcaacagaacggccttgaactgtaacgatagccttcacaccggctggatagcggggcttttctatcgctacaaattcaactcttcaggctgtcccgagaggttggccagctgccgacccctaccgattttgcccagggctggggccctattagttacgccaacggaagcggccccgaccaacgcccctactgctggcactatcccccaaagccttgcggcattgtgcccgcacagagcgtgtgtggcccggtgtattgcttcctcccagccccgtggtggtgggaacgaccgacaaggcgggcgcgcctacctacagatggggtgcaaacgatacggacgtcttcgtccttaacaacaccaggccaccactgggcaattggttcggttgacctggatgaactcaactggatacaccaaagtgtgcggggcgcccccctgcgtcatcggaggggtgggcaacaagaccttgcactgccccaccgattgtttccgcaagcatccggaagccacatactctcggtgcggctccgtccctggattacacccaggtgtctggtcgactatccgtataggctttggcattacccttgtaccatcaactacaccgtgttcaaagtcaggatgtacgtgggaggggtcgagcataggctggaggcgcctgcaactggacgcggggcgaacgttgcaatctggaagacagggacaggtccgagctcagcccgttgctgctgtccaccacacagtggcaagtccttccgtgttccttcacgaccctgccagccttgtccaccggcctctccacctccaccagaacattgtggacgtgcagtacttatacggggtggggtcaagcatcgcgtcctgggccatcaagtgggagtacgtcgttctcctattccttctgctcgcagacgcgcgcgtctgtcctgcttgtggatgatgttactcatatcccaagcggaggcggctttggagaacctcgtagtgctcaatgcagcatctttggccgggacacacggtcttgtgtccctcctcgtgttcttctgctttgcgtggtacctgaaggtaggtgggtgcccggagcggtctacgccctctacgggatgtggcctctcctcctgctcctattggcgttgccccagcgggcatatgcgttggacacggaggtggccgcgtcgtgtggcggcgctgtcttgtcgggttgatggcgctgactctgtcaccatattacaagcgctatgtcagctggtgcttatggtggcttcagtactttctgaccagagcagaagcgcaactgcacgtgtgggttccccctctcgacgtccgagggggggcgacgccgtcatcttactcatgtgtgctgtacgcccggctttggtgtttgacatcaccaagctgctgctggccgtcctcggacccctctggattctccaagccagtttgcttaaagtgccctacttgtgcgcgttcaaggccttctccggatctgcgcgctagcgcggaagatggcggggggtcattacgtgcaaatggtcatcatcaagttgggggcgctcactggcacttatgtgtataaccatctcactcctcttcgggactggcgcacaacggcctgcgagatctggctgtggctgtagagccagtcgtcttctcccgaatggagaccaacctcatcacgtggggggcagacaccgccgcatgcggcgacatcatcaacggcttgcccgttccgcccgcaggggccgggagatactgctcggaccagccgacggaatggtctccaaggggtggaggttgctggcacccatcacggcatacgcccagcagacaaggggcctcctagggtgtataatcaccagcctaaccggcgggacaaaaatcaggtggagggtgaggtccagattgtgtcaactgctgcccaaacctttctggcaacgtgcatcaatggagtatgctggaccgtctaccacggggccggaacgaggaccatcgcatccccaagggtcctgttatccagatgtacaccaatgtagataaagatctcgtgggttggcccgctcctcaaggttcccgttctttggcaccctgcacctgcggctcctcggacctttatctggtcacgaggcacgccgatgtcttcccgtgcgccggcggggtgatagcaggggcagcctgctttcgccccggcccatttcctacttgaaaggctcctcggggggtccgctgttgtgccccgcggggcacgccgtgggcattttcagggcgcggtgtgcacccgtggagtggctaaggcagtggactttatccctgtagagaacctagagacaaccatgaggtccccggtgttcacggacaactcctctccaccagcagtaccccagagcttccaggtggcccacctgcatctcccacaggcagcggcaagagcaccaaggtcccagctgcatacgcagctcagggctataaggtgctagtgctcaacccctctgttgctgcaacactaggcttcggtgcttatatgtccaaggcccagggatcgaccctaacatcaggaccggggtgagaacaattaccactggcagccccatcacgtactccacctacggcaagttccttgccgacggcgggtgctcagggggtgcttatgacataataatctgtgacgagtgccacccacggatgccacgtccatcttaggcatcggcaccgtccttgaccaagcagagaccgcaggggcgaggcttgttgtgctcgccaccgctacccctccgggctccatcactgtgccccatcctaacatgaggaggttgctctgtccaccaccggagagatccccttttatggcaaggctatccccctcgaagtaatcaagggggggaggcatctcatcttctgtcattcaaagaagaagtgtgacgagctcgctgcaaagctggttgcatgggcgtcaatgccgtggcctattaccgcggtcttgacgtgtctgtcatcccgaccagcggcgatgttgtcgtcgtggcaactgatgctctcatgaccggctataccggcgacttcgactcggtgatgactgcaacacgtgtgtcacccagacagtcgatttcagccttgaccccaccttcaccattgagacaaccacgcttccccaggatgctgtctcccgtacacaacggcggggcaggactggcagggggaagccaggcacctacggtttgtggcaccgggggagcgcccctctggcatgttcgactcgtctgtcctctgtgagtgctatgacgcgggctgtgcttggtatgagctcacgcccgccgagaccacagttaggctacgagcgtaatgaacaccccggggcttcccgtgtgccaggaccaccttgaattttgggagggcgtctttacgggccttacccatatagatgcccacttcctatcccagacaaagcagagtggggagaaccttccttacctggtagcgtacaagccaccgtgtgcgctagggctcaagcccctcccccgtcgtgggaccagatgtggaagtgtttagtccgcctcaagcccaccctccatgggccaacacccctgctatacagattgggcgctgttcaaatgaagtcaccctgacacacccaatcacaaaatacatcatgacatgtatgtcggctga

SEQ ID NO: 335 - DNA, 4869 bp, Hepatitis C virus
tcgcccacaggacgtcaagttcccgggtggcggtcagatcgttggtggagtttacttgttgccgcgcaggggccctagattgggtgtgcgcgcgacgaggaagacttccgagcggtcgcaacctcgagtagacgtcagcctatccccaaggcacgtcggcccgagggcaggacctgggctcagcccgggtacccctggcccctctatggcaatgagggctgcgggtgggcgggatggctcctgtctccccgtggtctcggcctaactggggccccacagacccccggcgtaggtcgcgtaatttgggtaaggtcatcgatacccttacatgcggcttcgccgacctcatggggtacataccgctcgtcggcgcccctcttgggggcgctgccaggccctggcgcatggcgtccgggttctggaagacggcgtgaactatgcaacagggaaccttcctggttgctctttctctatcttccttctggctttgctctcttgcctgactgtgcctgcttcagcctacaagtgcgcaactccacggggctttatcatgtcaccaatgattgccctaactcgagtattgtgtacgaggcggacgatgctatcctgcacactccggggtgtgtcccttgcgtccgcgagggtaacggctcgaggtgttggtggcgataacccccacggtggccaccagggacggcaaactccccacagtgcagcttcgacgtcacatcgatctgctcgtcgggagcgctaccctttgttcggccctttacgtgggggacctgtgcggtctgtctttcttgtcggccaactgttcaccttctctcccaggcgccactggacaacgcaggactgcaattgttccatctatcccggccatataacgggtcaccgtatggcatgggacatgatgatgaactggtcccctacgcggcgctggtagtagctcagatgctccggatcccacaagccatcctggacatgatcgctggtgctcactggggagtcctggcgggcatagcgtatttctccatggtggggaactgggcgaaggtcctgtagtgctgctgctatttgccggcgtcgacgcgggaacccacgtcaccgggggcattgccgcccgtaccacgtctagaattgctggtctcttcaacccaggcgcccagcaggacatccagctggttaacaccaacggcagtggcacatcaacagaacggccttgaactgtaacgatagccttcacaccggctggatagcggggcttttctatcgctacaaattcaactcttcaggctgtcccgagaggttggccagctgccgacccctaccgattttgcccagggctggggctctattagttacgccaacggaagcggccccgaccaacgcccctactgctggcactatcccccaaagccttgcggcattgtgcccgcacagagcgtgtgtggcccggtgtattgcttcctcccagccccgtggtggtgggaacgaccgacaaggcgggcgcgcctacctacagatggggtgcaaacgatacggacgtcttcgtccttaacaacaccaggccaccactgggcaattggttcggttgacctggatgaactcaactggatacaccaaagtgtgcggggcgcccccctgcgtcatcggaggggtgggcaacaagaccttgcactgccccaccgattgtttccgcaagcatccggaagccacatactctcggtgcggctccgtccctggattacacccaggtgtctggtcgactatccgtataggctttggcattacccttgtaccatcaactacaccgtgttcaaagtcaggatgtacgtgggaggggtcgagcataggctggaggcgcctgcaactggacgcggggcgaacgttgcaatctggaagacagggacaggtccgagctcagcccgttgctgctgtccaccacacagtggcaagtccttccgtgttccttcacgaccctgccagccttgtccaccggcctctccacctccaccagaacattgtggacgtgcagtacttatacggggtggggtcaagcatcgcgtcctgggccatcaagtgggagtacgtcgttctcctattccttctgctcgcagacgcgcgcgtctgtcctgcttgtggatgatgttactcatatcccaagcggaggcggctttggagaacctcgtagtgctcaatgcagcatctttggtcgggacacacggtcttgtgtccctcctcgtgttcttctgctttgcgtggtacctgaaggtaggtgggtgcccggagcggtctacgccctctacgggatgtggcctctcctcctgctcctattggcgttgccccagcgggcatatgcgttggacacggaggtggccgcgtcgtgtggcggcgctgtcttgtcgggttgatggcgctgactctgtcaccatattacaagcgctatgtcagctggtgcttatggtggcttcagtactttctgaccagagcagaagcgcaactgcacgtgtgggttccccctctcgacgtccgagggggggcgacgccgtcatcttactcatgtgtgctgtacgcccggctttggtgtttgacatcaccaagctgctgctggccgtcctcggacccctctggattctccaagccagtttgcttaaagtgccctacttgtgcgcgttcaaggccttctccggatctgcgcgctagcgcggaagatggcggggggtcattacgtgcaaatggtcatcatcaagttgggggcgctcactggcacttatgtgtataaccatctcactcctcttcgggactggcgcacaacggcctgcgagatctggctgtggctgtagagccagtcgtcttctcccgaatggagaccaacctcatcacgtggggggcagacaccgccgcatgcggcgacatcatcaacggcttgcccgttccgcccgcaggggccgggagatactgctcggaccagccgacggaatggtctccaaggggtggaggttgctggcacccatcacggcatacgcccagcagacaaggggcctcctagggtgtataatcaccagcctaaccggcgggacaaaaatcaggtggagggtgaggtccagattgtgtcaactgctgcccaaacctttctggcaacgtgcatcaatggagtatgctggaccgtctaccacggggccggaacgaggaccatcgcatccccaagggtcctgttatccagatgtacaccaatgtagataaagatctcgtgggttggcccgctcctcaaggttcccgttctttggcaccctgcacctgcggctcctcggacctttatctggtcacgaggcacgccgatgtcttcccgtgcgccggcggggtgatagcaggggcagcctgctttcgccccggcccatttcctacttgaaaggctcctcggggggtccgctgttgtgccccgcggggcacgccgtgggcattttcagggcgcggtgtgcacccgtggagtggctaaggcagtggactttatccctgtagagaacctagagacaaccatgaggtccccggtgttcacggacaactcctctccaccagcagtaccccagagcttccaggtggcccacctgcatctcccacaggcagcggcaagagcaccaaggtcccagctgcatacgcagctcagggctataaggtgctagtgctcaacccctctgttgctgcaacactaggcttcggtgcttatatgtccaaggcccagggatcgaccctaacatcaggaccggggtgagaacaattaccactggcagccccatcacgtactccacctacggcaagttccttgccgacggcgggtgctcagggggtgcttatgacataataatctgtgacgagtgccacccacggatgccacgtccatcttaggcatcggcaccgtccttgaccaagcagagaccgcaggggcgaggcttgttgtgctcgccaccgctacccctccgggctccatcactgtgccccatcctaacatgaggaggttgctctgtccaccaccggagagatccccttttatggcaaggctatccccctcgaagtaatcaagggggggaggcatctcatcttctgtcattcaaagaagaagtgtgacgagctcgctgcaaagctggttgcatgggcgtcaatgccgtggcctattaccgcggtcttgacgtgtctgtcatcccgaccagcggcgatgttgtcgtcgtggcaactgatgctctcatgaccggctataccggcgacttcgactcggtgatgactgcaacacgtgtgtcacccagacagtcgatttcagccttgaccccaccttcaccattgagacaaccacgcttccccaggatgctgtctcccgtacacaacggcggggcaggactggcagggggaagccaggcacctacggtttgtggcaccgggggagcgcccctctggcatgttcgactcgtctgtcctctgtgagtgctatgacgcgggctgtgcttggtatgagctcacgcccgccgagaccacagttaggctacgagcgtaatgaacaccccggggcttcccgtgtgccaggaccaccttgaattttgggagggcgtctttacgggccttacccatatagatgcccacttcctatcccagacaaagcagagtggggagaaccttccttacctggtagcgtacaagccaccgtgtgcgctagggctcaagcccctcccccgtcgtgggaccagatgtggaagtgtttagtccgcctcaagcccaccctccatgggccaacacccctgctatacagattgggcgctgttcaaatgaagtcaccctgacacacccaatcacaaaatacatcatgacatgtatgtcggctga

SEQ ID NO: 336 - DNA, 4869 bp, Hepatitis C virus; identical to SEQ ID NO: 194

SEQ ID NO: 337 - DNA, 4869 bp, Hepatitis C virus; identical to SEQ ID NO: 194

SEQ ID NO: 338 - DNA, 4869 bp, Hepatitis C virus; identical to SEQ ID NO: 239

SEQ ID NO: 339 - DNA, 4869 bp, Hepatitis C virus; identical to SEQ ID NO: 194

SEQ ID NO: 340 - DNA, 5221 bp, Hepatitis C virus; identical to SEQ ID NO: 201

SEQ ID NO: 341 - DNA, 5221 bp, Hepatitis C virus; identical to SEQ ID NO: 201

SEQ ID NO: 342 - DNA, 4869 bp, Hepatitis C virus
tcgcccacaggacgtcaagttcccgggtggcggtcagatcgttggtggagtttacttgttgccgcgcaggggccctagattgggtgtgcgcgcgacgaggaagacttccgagcggtcgcaacctcgagtagacgtcagcctatccctaaggcacgtcggcccgagggcaggacctgggctcagcccgggtatccctggcccctctatggcaatgagggctgcgggtgggcgggatggctcctgtctccccgtggtctcggcctaactggggccccacagacccccggcgtaggtcgcgtaatttgggtaaggtcatcgatacccttacatgcggcttcgccgacctcatggggtacataccgctcgtcggcgcccctcttgggggcgctgccaggccctggcgcatggcgtccgggttctggaagacggcgtgaactatgcaacagggaaccttcctggttgctctttctctatcttccttctggctttgctctcttgcctgactgtgcctgcttcagcctacaagtgcgcaactccacggggctttatcatgtcaccaatgattgccctaactcgagtattgtgtacgaggcggacgatgctatcctgcacactccggggtgtgtcccttgcgtccgcgagggtaacggctcgaggtgttggtggcgataacccccacggtggccaccagggacggcaaactccccacagtgcagcttcgacgtcacatcgatctgctcgtcgggagcgctaccctttgttcggccctttacgtgggggacctgtgcggtctgtctttcttgtcggccaactgttcaccttctctcccaggcgccactggacaacgcaggactgcaattgttccatctatcccggccatataacgggtcaccgtatggcatgggacatgatgatgaactggtcccctacgcggcgctggtagtagctcagatgctccggatcccacaagccatcctggacatgatcgctggtgctcactggggagtcctggcgggcatagcgtatttctccatggtggggaactgggcgaaggtcctgtagtgctgctgctatttgccggcgtcgacgcgggaacccacgtcaccgggggcattgccgcccgtaccacgtctagaattgctggtctcttcaacccaggcgcccagcaggacatccagctggttaacaccaacggcagtggcacatcaacagaacggccttgaactgtaacgatagccttcacaccggctggatagcggggcttttctatcgctacaaattcaactcttcaggctgtcccgagaggttggccagctgccgacccctaccgattttgcccagggctggggccctattagttacgccaacggaagcggccccgaccaacgcccctactgctggcactatcccccaaagccttgcggcattgtgcccgcacagagcgtgtgtggcccggtgtattgcttcctcccagccccgtggtggtgggaacgaccgacaaggcgggcgcgcctacctacagatggggtgcaaacgatacggacgtcttcgtccttaacaacaccaggccaccactgggcaattggttcggttgacctggatgaactcaactggatacaccaaagtgtgcggggcgcccccctgcgtcatcggaggggtgggcaacaagaccttgcactgccccaccgattgtttccgcaagcatccggaagccacatactctcggtgcggctccgtccctggattacacccaggtgtctggtcgactatccgtataggctttggcattacccttgtaccatcaactacaccgtgttcaaagtcaggatgtacgtgggaggggtcgagcataggctggaggcgcctgcaactggacgcggggcgaacgttgcaatctggaagacagggacaggtccgagctcagcccgttgctgctgtccaccacacagtggcaagtccttccgtgttccttcacgaccctgccagccttgtccaccggcctctccacctccaccagaacattgtggacgtgcagtacttatacggggtggggtcaagcatcgcgtcctgggccatcaagtgggagtacgtcgttctcctattccttctgctcgcagacgcgcgcgtctgtcctgcttgtggatgatgttactcatatcccaagcggaggcggctttggagaacctcgtagtgctcaatgcagcatctttggccgggacacacggtcttgtgtccctcctcgtgttcttctgctttgcgtggtacctgaaggtaggtgggtgcccggagcggtctacgccctctacgggatgtggcctctcctcctgctcctattggcgttgccccagcgggcatatgcgttggacacggaggtggccgcgtcgtgtggcggcgctgtcttgtcgggttgatggcgctgactctgtcaccatattacaagcgctatgtcagctggtgcttatggtggcttcagtactttctgaccagagcagaagcgcaactgcacgtgtgggttccccctctcgacgtccgagggggggcgacgccgtcatcttactcatgtgtgctgtacgcccggctttggtgtttgacatcaccaagctgctgctggccgtcctcggacccctctggattctccaagccagtttgcttaaagtgccctacttgtgcgcgttcaaggccttctccggatctgcgcgctagcgcggaagatggcggggggtcattacgtgcaaatggtcatcatcaagttgggggcgctcactggcacttatgtgtataaccatctcactcctcttcgggactggcgcacaacggcctgcgagatctggctgtggctgtagagccagtcgtcttctcccgaatggagaccaacctcatcacgtggggggcagacaccgccgcatgcggcgacatcatcaacggcttgcccgttccgcccgcaggggccgggagatactgctcggaccagccgacggaatggtctccaaggggtggaggttgctggcacccatcacggcatacgcccagcagacaaggggcctcctagggtgtataatcaccagcctaaccggcgggacaaaaatcaggtggagggtgaggtccagattgtgtcaactgctgcccaaacctttctggcaacgtgcatcaatggagtatgctggaccgtctaccacggggccggaacgaggaccatcgcatccccaagggtcctgttatccagatgtacaccaatgtagataaagatctcgtgggttggcccgctcctcaaggttcccgttctttggcaccctgcacctgcggctcctcggacctttatctggtcacgaggcacgccgatgtcttcccgtgcgccggcggggtgatagcaggggcagcctgctttcgccccggcccatttcctacttgaaaggctcctcggggggtccgctgttgtgccccgcggggcacgccgtgggcattttcagggcgcggtgtgcacccgtggagtggctaaggcagtggactttatccctgtagagaacctagagacaaccatgaggtccccggtgttcacggacaactcctctccaccagcagtaccccagagcttccaggtggcccacctgcatctcccacaggcagcggcaagagcaccaaggtcccagctgcatacgcagctcagggctataaggtgctagtgctcaacccctctgttgctgcaacactaggcttcggtgcttatatgtccaaggcccagggatcgaccctaacatcaggaccggggtgagaacaattaccactggcagccccatcacgtactccacctacggcaagttccttgccgacggcgggtgctcagggggtgcttatgacataataatctgtgacgagtgccacccacggatgccacgtccatcttaggcatcggcaccgtccttgaccaagcagagaccgcaggggcgaggcttgttgtgctcgccaccgctacccctccgggctccatcactgtgccccatcctaacatgaggaggttgctctgtccaccaccggagagatccccttttatggcaaggctatccccctcgaagtaatcaagggggggaggcatctcatcttctgtcattcaaagaagaagtgtgacgagctcgctgcaaagctggttgcatgggcgtcaatgccgtggcctattaccgcggtcttgacgtgtctgtcatcccgaccagcggcgatgttgtcgtcgtggcaactgatgctctcatgaccggctataccggcgacttcgactcggtgatgactgcaacacgtgtgtcacccagacagtcgatttcagccttgaccccaccttcaccattgagacaaccacgcttccccaggatgctgtctcccgtacacaacggcggggcaggactggcagggggaagccaggcacctacggtttgtggcaccgggggagcgcccctctggcatgttcgactcgtctgtcctctgtgagtgctatgacgcgggctgtgcttggtatgagctcacgcccgccgagaccacagttaggctacgagcgtaatgaacaccccggggcttcccgtgtgccaggaccaccttgaattttgggagggcgtctttacgggccttacccatatagatgcccacttcctatcccagacaaagcagagtggggagaaccttccttacctggtagcgtacaagccaccgtgtgcgctagggctcaagcccctcccccgtcgtgggaccagatgtggaagtgtttagtccgcctcaagcccaccctccatgggccaacacccctgctatacagattgggcgctgttcaaatgaagtcaccctgacacacccaatcacaaaatacatcatgacatgtatgtcggctga

SEQ ID NO: 343 - DNA, 4869 bp, Hepatitis C virus
tcgcccacaggacgtcaagttcccgggtggcggtcagatcgttggtggagtttacttgttgccgcgcaggggccctagattgggtgtgcgcgcgacgaggaagacttccgagcggtcgcaacctcgagtagacgtcagcctatccccaaggcacgtcggcccgagggcaggacctgggctcagcccgggtacccctggcccctctatggcaatgagggctgcgggtgggcgggatggctcctgtctccccgtggtctcggcctaactggggccccacagacccccggcgtaggtcgcgtaatttgggtaaggtcatcgatacccttacatgcggcttcgccgacctcatggggtacataccgctcgtcggcgcccctcttgggggcgctgccaggccctggcgcatggcgtccgggttctggaagacggcgtgaactatgcaacagggaaccttcctggttgctctttctctatcttccttctggctttgctctcttgcctgactgtgcctgcttcagcctacaagtgcgcaactccacggggctttatcatgtcaccaatgattgccctaactcgagtattgtgtacgaggcggacgatgctatcctgcacactccggggtgtgtcccttgcgtccgcgagggtaacggctcgaggtgttggtggcgataacccccacggtggccaccagggacggcaaactccccacagtgcagcttcgacgtcacatcgatctgctcgtcgggagcgctaccctttgttcggccctttacgtgggggacctgtgcggtctgtctttcttgtcggccaactgttcaccttctctcccaggcgccactggacaacgcaggactgcaattgttccatctatcccggccatataacgggtcaccgtatggcatgggacatgatgatgaactggtcccctacgcggcgctggtagtagctcagatgctccggatcccacaagccatcctggacatgatcgctggtgctcactggggagtcctggcgggcatagcgtatttctccatggtggggaactgggcgaaggtcctgtagtgctgctgctatttgccggcgtcgacgcgggaacccacgtcaccgggggcattgccgcccgtaccacgtctagaattgctggtctcttcaacccaggcgcccagcaggacatccagctggttaacaccaacggcagtggcacatcaacagaacggccttgaactgtaacgatagccttcacaccggctggatagcggggcttttctatcgctacaaattcaactcttcaggctgtcccgagaggttggccagctgccgacccctaccgattttgcccagggctggggccctattagttacgccaacggaagcggccccgaccaacgcccctactgctggcactatcccccaaagccttgcggcattgtgcccgcacagagcgtgtgtggcccggtgtattgcttcctcccagccccgtggtggtgggaacgaccgacaaggcgggcgcgcctacctacagatggggtgcaaacgatacggacgtcttcgtccttaacaacaccaggccaccactgggcaattggttcggttgacctggatgaactcaactggatacaccaaagtgtgcggggcgcccccctgcgtcatcggaggggtgggcaacaagaccttgcactgccccaccgattgtttccgcaagcatccggaagccacatactctcggtgcggctccgtccctggattacacccaggtgtctggtcgactatccgtataggctttggcattacccttgtaccatcaactacaccgtgttcaaagtcaggatgtacgtgggaggggtcgagcataggctggaggcgcctgcaactggacgcggggcgaacgttgcaatctggaagacagggacaggtccgagctcagcccgttgctgctgtccaccacacagtggcaagtccttccgtgttccttcacgaccctgccagccttgtccaccggcctctccacctccaccagaacattgtggacgtgcagtacttatacggggtggggtcaagcatcgcgtcctgggccatcaagtgggagtacgtcgttctcctattccttctgctcgcagacgcgcgcgtctgtcctgcttgtggatgatgttactcatatcccaagcggaggcggctttggagaacctcgtagtgctcaatgcagcatccttggccgggacacacggtcttgtgtccctcctcgtgttcttctgctttgcgtggtacctgaaggtaggtgggtgcccggagcggtctacgccctctacgggatgtggcctctcctcctgctcctattggcgttgccccagcgggcatatgcgttggacacggaggtggccgcgtcgtgtggcggcgctgtcttgtcgggttgatggcgctgactctgtcaccatattacaagcgctatgtcagctggtgcttatggtggcttcagtactttctgaccagagcagaagcgcaactgcacgtgtgggttccccctctcgacgtccgagggggggcgacgccgtcatcttactcatgtgtgctgtacgcccggctttggtgtttgacatcaccaagctgctgctggccgtcctcggacccctctggattctccaagccagtttgcttaaagtgccctacttgtgcgcgttcaaggccttctccggatctgcgcgctagcgcggaagatggcggggggtcattacgtgcaaatggtcatcatcaagttgggggcgctcactggcacttatgtgtataaccatctcactcctcttcgggactggcgcacaacggcctgcgagatctggctgtggctgtagagccagtcgtcttctcccgaatggagaccaacctcatcacgtggggggcagacaccgccgcatgcggcgacatcatcaacggcttgcccgttccgcccgcaggggccgggagatactgctcggaccagccgacggaatggtctccaaggggtggaggttgctggcacccatcacggcatacgcccagcagacaaggggcctcctagggtgtataatcaccagcctaaccggcgggacaaaaatcaggtggagggtgaggtccagattgtgtcaactgctgcccaaacctttctggcaacgtgcatcaatggagtatgctggaccgtctaccacggggccggaacgaggaccatcgcatccccaagggtcctgttatccagatgtacaccaatgtagataaagatctcgtgggttggcccgctcctcaaggttcccgttctttggcaccctgcacctgcggctcctcggacctttatctggtcacgaggcacgccgatgtcttcccgtgcgccggcggggtgatagcaggggcagcctgctttcgccccggcccatttcctacttgaaaggctcctcggggggtccgctgttgtgccccgcggggcacgccgtgggcattttcagggcgcggtgtgcacccgtggagtggctaaggcagtggactttatccctgtagagaacctagagacaaccatgaggtccccggtgttcacggacaactcctctccaccagcagtaccccagagcttccaggtggcccacctgcatctcccacaggcagcggcaagagcaccaaggtcccagctgcatacgcagctcagggctataaggtgctagtgctcaacccctctgttgctgcaacactaggcttcggtgcttatatgtccaaggcccagggatcgaccctaacatcaggaccggggtgagaacaattaccactggcagccccatcacgtactccacctacggcaagttccttgccgacggcgggtgctcagggggtgcttatgacataataatctgtgacgagtgccacccacggatgccacgtccatcttaggcatcggcaccgtccttgaccaagcagagaccgcaggggcgaggcttgttgtgctcgccaccgctacccctccgggctccatcactgtgccccatcctaacatgaggaggttgctctgtccaccaccggagagatccccttttatggcaaggctatccccctcgaagtaatcaagggggggaggcatctcatcttctgtcattcaaagaagaagtgtgacgagctcgctgcaaagctggttgcatgggcgtcaatgccgtggcctattaccgcggtcttgacgtgtctgtcatcccgaccagcggcgatgttgtcgtcgtggcaactgatgctctcatgaccggctataccggcgacttcgactcggtgatgactgcaacacgtgtgtcacccagacagtcgatttcagccttgaccccaccttcaccattgagacaaccacgcttccccaggatgctgtctcccgtacacaacggcggggcaggactggcagggggaagccaggcacctacggtttgtggcaccgggggagcgcccctctggcatgttcgactcgtctgtcctctgtgagtgctatgacgcgggctgtgcttggtatgagctcacgcccgccgagaccacagttaggctacgagcgtaatgaacaccccggggcttcccgtgtgccaggaccaccttgaattttgggagggcgtctttacgggccttacccatatagatgcccacttcctatcccagacaaagcagagtggggagaaccttccttacctggtagcgtacaagccaccgtgtgcgctagggctcaagcccctcccccgtcgtgggaccagatgtggaagtgtttagtccgcctcaagcccaccctccatgggccaacacccctgctatacagattgggcgctgttcaaatgaagtcaccctgacacacccaatcacaaaatacatcatgacatgtatgtcggctga

SEQ ID NO: 344 - DNA, 5221 bp, Hepatitis C virus
tcactcccctgtgaggaactactgtcttcacgcagaaagcgtctagccatggcgttagtatgagtgtcgtgcagcctccaggaccccccctcccgggagagccatagtggtctgcggaaccggtgagacaccggaattgccaggacgaccgggtcctttcttggataaacccgctcaatgcctggagatttgggcgtgcccccgcaagactgctagccgagtagtgttgggtcgcgaaaggccttgtggtactgctgatagggtgcttgcgagtgccccgggaggtctcgtagaccgtgcaccatgagcacgaatcctaaacctcaaagaaaaaccaaacgtaacaccaaccgtcgcccacaggacgtcaagttcccgggtggcggtcagatcgtggtggagtttacttgttgccgcgcaggggccctagattgggtgtgcgcgcgacgaggaagacttccgagcggtcgcaacctcgaggtagacgtcagcctatccccaaggcacgtcggcccgagggcagacctgggctcagcccgggtacccctggcccctctatggcaatgagggctgcgggtgggcgggatggctcctgtctccccgtggctctcggcctaactggggccccacagacccccggcgtaggtcgcgtaatttgggtaagtcatcgatacccttacatgcggcttcgccgacctcatggggtacataccgctcgtcggcgcccctcttgggggcgctgccagggccctggcgcatggcgtccgggttctggaagacggcgtgaacttgcaacagggaaccttcctggttgctctttctctatcttccttctggctttgctctcttgcctgactgtgcctgcttcagcctaccaagtgcgcaactccacggggctttatcatgtcaccaatgattgccctaactcgagattgtgtacgaggcggacgatgctatcctgcacactccggggtgtgtcccttgcgtccgcgagggtaacggctcgaggtgttgggtggcgataacccccacggtggccaccagggacggcaaactcccacagtgcagcttcgacgtcacatcgatctgctcgtcgggagcgctaccctttgttcggccctttacgtgggggacctgtgcgggtctgtctttcttgtcggccaactgttcaccttctctcccaggcgccactggacaaccaggactgcaattgttccatctatcccggccatataacgggtcaccgtatggcatgggacatgatgatgaactggtcccctacgacggcgctggtagtagctcagatgctccggatcccacaagccacctggacatgatcgctggtgctcactggggagtcctggcgggcatagcgtatttctccatggtggggaactgggcgaaggtcctggtagtgctgctgctatttgccggcgtcgacgcgggaacccacgtcaccgggggcatgccgcccgtaccacgtctagaattgctggtctcttcaacccaggcgcccagcaggacatccagctggttaacaccaacggcagttggcacatcaacagaacggccttgaactgtaacgatagccttccaccggctggatagcggggcttttctatcgctacaaattcaactcttcaggctgtcccgagaggttggccagctgccgaccccttaccgattttgcccagggctggggccctattagttacgccaacggaagcggccccgacaacgcccctactgctggcactatcccccaaagccttgcggcattgtgcccgcacagagcgtgtgtggcccggtgtattgcttcactcccagccccgtggtggtgggaacgaccgacaaggcgggcggcctacctacagatggggtgcaaacgatacggacgtcttcgtccttaacaacaccaggccaccactgggcaattggttcggttgcacctggatgaactcaactggatacaccaaagtgtgcggggcgcccccctgcgtcatggaggggtgggcaacaagaccttgcactgccccaccgattgtttccgcaagcatccggaagccacatactctcggtgcggctccggtccctggattacacccaggtgtctggtcgactatccgtatagctttggcattacccttgtaccatcaactacaccgtgttcaaagtcaggatgtacgtgggaggggtcgagcataggctggaggctgcctgcaactggacgcggggcgaacgttgcaatctggaagacagggacaggtccgactcagcccgttgctgctgtccaccacacagtggcaagtccttccgtgttccttcacgaccctgccagccttgtccaccggcctcatccacctccaccagaacattgtggacgtgcagtacttatacgggtggggtcaagcatcgcgtcctgggccatcaagtgggagtacgtcgttctcctattccttctgctcgcagacgcgcgcgtctgctcctgcttgtggatgatgttactcatatcccaagcggaggcggctttggagaacctgtagtgctcaatgcagcatctttggccgggacacacggtcttgtgtccctcctcgtgttcttctgctttgcgtggtacctgaagggtaggtgggtgcccggagcggtctacgccctctacgggatgtgcctctcctcctgctcctattggcgttgccccagcgggcatatgcgttggacacggaggtggccgcgtcgtgtggcggcgctgttcttgtcgggttgatggcgctgactctgtcaccatattacaagcgctatgtcagctgtgcttatggtggcttcagtactttctgaccagagcagaagcgcaactgcacgtgtgggttccccctctcgacgtccgaggggggcgcgacgccgtcatcttactcatgtgtgctgtacgcccggcttggtgtttgacatcaccaagctgctgctggccgtcctcggacccctctggattctccaagccagtttgcttaaagtgccctactttgtgcgcgttcaaggccttctccggatctgcgcgctagcgcggaagatggcggggggcattacgtgcaaatggtcatcatcaagttgggggcgctcactggcacttatgtgtataaccatctcactcctcttcgggactgggcgcacaacggcctgcgagatctggctgtggctgtagagccagcgtcttctcccgaatggagaccaacctcatcacgtggggggcagacaccgccgcatgcggcgacatcatcaacggcttgcccgtctccgcccgcaggggccgggagatactgctcggaccagccgacggaatggtctccaagggtggaggttgctggcacccatcacggcatacgcccagcagacaaggggcctcctagggtgtataatcaccagcctaaccggccgggacaaaaatcaggtggagggtgaggtccagattgtgtcaatgctgcccaaacctttctggcaacgtgcatcaatggagtatgctggaccgtctaccacggggcaggaacgaggaccatcgcatcacccaagggtcctgttatccagatgtacaccaatgtagataaagatctcgtgggttgcccgctcctcaaggttcccgttctttggcaccctgcacctgcggctcctcggacctttatctggtcacgaggcacgccgatgtcattcccgtgcgccggcggggtgatagcaggggcagcctgctttgccccggcccatttcctacttgaaaggctcctcggggggtccgctgttgtgccccgcggggcacgccgtgggcattttcagggccgcggtgtgcacccgtggagtggctaaggcagtggactttatccctgtagagaacctgagacaaccatgaggtccccggtgttcacggacaactcctctccaccagcagtaccccagagcttccaggtggcccacctgcatgctcccacaggcagcggcaagagcaccaaggtcccagctgcatcgcagctcagggctataaggtgctagtgctcaacccctctgttgctgcaacactaggcttcggtgcttatatgtccaaggcccatgggatcgaccctaacatcaggaccggggtgagaacaattaccactggcagccccatacgtactccacctacggcaagttccttgccgacggcgggtgctcagggggtgcttatgacataataatctgtgacgagtgccactccacggatgccacgtccatcttaggcatcggcaccgtccttgccaagcagagaccgcaggggcgaggcttgttgtgctcgccaccgctacccctccgggctccatcactgtgccccatcctaacatcgaggaggttgctctgtccaccaccggagagatccccttttatggcaaggctatcccctcgaagtaatcaagggggggaggcatctcatcttctgtcattcaaagaagaagtgtgacgagctcgctgcaaagctggttgcattgggcgtcaatgccgtggcctattaccgcggtcttgacgtgttgtcatcccgaccagcggcgatgttgtcgtcgtggcaactgatgctctcatgaccggctataccggcgacttcgactcggtgatagactgcaacacgtgtgtcacccagacagtcgatttcagccttgaccccaccttcacattgagacaaccacgcttccccaggatgctgtctcccgtacacaacggcggggcaggactggcagggggaagccaggcacctacaggtttgtggcaccgggggagcgcccctctggcatgttcgactgtctgtcctctgtgagtgctatgacgcgggctgtgcttggtatgagctcacgcccgccgagaccacagttaggctacgagcgtacatgaacaccccggggcttcccgtgtgccaggaccaccttgaattttgggagggcgttttacgggccttacccatatagatgcccacttcctatcccagacaaagcagagtggggagaaccttccttacctggtagcgtaccaagccaccgtgtgcgctagggctcaagcccctcccccgtcgtggaccagatgtggaagtgtttagtccgcctcaagcccaccctccatgggccaacacccctgctatacagattgggcgctgttcagaatgaagtcaccctgacacacccaatcacaaaatacatcatgacatgtatgtcggcga

SEQ ID NO: 345 - DNA, 5221 bp, Hepatitis C virus; identical to SEQ ID NO: 201

SEQ ID NO: 346 - DNA, 4869 bp, Hepatitis C virus; identical to SEQ ID NO: 224

SEQ ID NO: 347 - DNA, 5221 bp, Hepatitis C virus
tcactcccctgtgaggaactactgtcttcacgcagaaagcgtctagccatggcgttagtatgagtgtcgtgcagcctccaggaccccccctcccgggagagccatagtggtctgcggaaccggtgagacaccggaattgccaggacgaccgggtcctttcttggataaacccgctcaatgcctggagatttgggcgtgcccccgcaagactgctagccgagtagtgttgggtcgcgaaaggccttgtggtactgctgatagggtgcttgcgagtgccccgggaggtctcgtagaccgtgcaccatgagcacgaatcctaaacctcaaagaaaaaccaaacgtaacaccaaccgtcgcccacaggacgtcaagttcccgggtggcggtcagatcgtggtggagtttacttgttgccgcgcaggggccctagattgggtgtgcgcgcgacgaggaagacttccgagcggtcgcaacctcgaggtagacgtcagcctatccccaaggcacgtcggcccgagggcagacctgggctcagcccgggtacccctggcccctctatggcaatgagggctgcgggtgggcgggatggctcctgtctccccgtggctctcggcctaactggggccccacagacccccggcgtaggtcgcgtaatttgggtaagtcatcgatacccttacatgcggcttcgccgacctcatggggtacataccgctcgtcggcgcccctcttgggggcgctgccagggccctggcgcatggcgtccgggttctggaagacggcgtgaacttgcaacagggaaccttcctggttgctctttctctatcttccttctggctttgctctcttgcctgactgtgcctgcttcagcctaccaagtgcgcaactccacggggctttatcatgtcaccaatgattgccctaactcgagattgtgtacgaggcggacgatgctatcctgcacactccggggtgtgtcccttgcgtccgcgagggtaacggctcgaggtgttgggtggcgataacccccacggtggccaccagggacggcaaactcccacagtgcagcttcgacgtcacatcgatctgctcgtcgggagcgctaccctttgttcggccctttacgtgggggacctgtgcgggtctgtctttcttgtcggccaactgttcaccttctctcccaggcgccactggacaaccaggactgcaattgttccatctatcccggccatataacgggtcaccgtatggcatgggacatgatgatgaactggtcccctacgacggcgctggtagtagctcagatgctccggatcccacaagccacctggacatgatcgctggtgctcactggggagtcctggcgggcatagcgtatttctccatggtggggaactgggcgaaggtcctggtagtgctgctgctatttgccggcgtcgacgcgggaacccacgtcaccgggggcatgccgcccgtaccacgtctagaattgctggtctcttcaacccaggcgcccagcaggacatccagctggttaacaccaacggcagttggcacatcaacagaacggccttgaactgtaacgatagccttccaccggctggatagcggggcttttctatcgctacaaattcaactcttcaggctgtcccgagaggttggccagctgccgaccccttaccgattttgcccagggctggggccctattagttacgccaacggaagcggccccgacaacgcccctactgctggcactatcccccaaagccttgcggcattgtgcccgcacagagcgtgtgtggcccggtgtattgcttcactcccagccccgtggtggtgggaacgaccgacaaggcgggcggcctacctacagatggggtgcaaacgatacggacgtcttcgtccttaacaacaccaggccaccactgggcaattggttcggttgcacctggatgaactcaactggatacaccaaagtgtgcggggcgcccccctgcgtcatggaggggtgggcaacaagaccttgcactgccccaccgattgtttccgcaagcatccggaagccacatactctcggtgcggctccggtccttggattacacccaggtgtctggtcgactatccgtatagctttggcattacccttgtaccatcaactacaccgtgttcaaagtcaggatgtacgtgggaggggtcgagcataggctggaggctgcctgcaactggacgcggggcgaacgttgcaatctggaagacagggacaggtccgactcagcccgttgctgctgtccaccacacagtggcaagtccttccgtgttccttcacgaccctgccagccttgtccaccggcctcatccacctccaccagaacattgtggacgtgcagtacttatacgggtggggtcaagcatcgcgtcctgggccatcaagtgggagtacgtcgttctcctattccttctgctcgcagacgcgcgcgtctgctcctgcttgtggatgatgttactcatatcccaagcggaggcggctttggagaacctgtagtgctcaatgcagcatctttggccgggacacacggtcttgtgtccctcctcgtgttcttctgctttgcgtggtacctgaagggtaggtgggtgcccggagcggtctacgccctctacgggatgtgcctctcctcctgctcctattggcgttgccccagcgggcatatgcgttggacacggaggtggccgcgtcgtgtggcggcgctgttcttgtcgggttgatggcgctgactctgtcaccatattacaagcgctatgtcagctgtgcttatggtggcttcagtactttctgaccagagcagaagcgcaactgcacgtgtgggttccccctctcgacgtccgaggggggcgcgacgccgtcatcttactcatgtgtgctgtacgcccggcttggtgtttgacatcaccaagctgctgctggccgtcctcggacccctctggattctccaagccagtttgcttaaagtgccctactttgtgcgcgttcaaggccttctccggatctgcgcgctagcgcggaagatggcggggggcattacgtgcaaatggtcatcatcaagttgggggcgctcactggcacttatgtgtataaccatctcactcctcttcgggactgggcgcacaacggcctgcgagatctggctgtggctgtagagccagcgtcttctcccgaatggagaccaacctcatcacgtggggggcagacaccgccgcatgcggcgacatcatcaacggcttgcccgtctccgcccgcaggggccgggagatactgctcggaccagccgacggaatggtctccaagggtggaggttgctggcacccatcacggcatacgcccagcagacaaggggcctcctagggtgtataatcaccagcctaaccggccgggacaaaaatcaggtggagggtgaggtccagattgtgtcaatgctgcccaaacctttctggcaacgtgcatcaatggagtatgctggaccgtctaccacggggccggaacgaggaccatcgcatcacccaagggtcctgttatccagatgtacaccaatgtagataaagatctcgtgggttgcccgctcctcaaggttcccgttctttggcaccctgcacctgcggctcctcggacctttatctggtcacgaggcacgccgatgtcattcccgtgcgccggcggggtgatagcaggggcagcctgctttgccccggcccatttcctacttgaaaggctcctcggggggtccgctgttgtgccccgcggggcacgccgtgggcattttcagggccgcggtgtgcacccgtggagtggctaaggcagtggactttatccctgtagagaacctgagacaaccatgaggtccccggtgttcacggacaactcctctccaccagcagtaccccagagcttccaggtggcccacctgcatgctcccacaggcagcggcaagagcaccaaggtcccagctgcatcgcagctcagggctataaggtgctagtgctcaacccctctgttgctgcaacactaggcttcggtgcttatatgtccaaggcccatgggatcgaccctaacatcaggaccggggtgagaacaattaccactggcagccccatacgtactccacctacggcaagttccttgccgacggcgggtgctcagggggtgcttatgacataataatctgtgacgagtgccactccacggatgccacgtccatcttaggcatcggcaccgtccttgccaagcagagaccgcaggggcgaggcttgttgtgctcgccaccgctacccctccgggctccatcactgtgccccatcctaacatcgaggaggttgctctgtccaccaccggagagatccccttttatggcaaggctatcccctcgaagtaatcaagggggggaggcatctcatcttctgtcattcaaagaagaagtgtgacgagctcgctgcaaagctggttgcattgggcgtcaatgccgtggcctattaccgcggtcttgacgtgttgtcatcccgaccagcggcgatgttgtcgtcgtggcaactgatgctctcatgaccggctataccggcgacttcgactcggtgatagactgcaacacgtgtgtcacccagacagtcgatttcagccttgaccccaccttcacattgagacaaccacgcttccccaggatgctgtctcccgtacacaacggcggggcaggactggcagggggaagccaggcacctacaggtttgtggcaccgggggagcgcccctctggcatgttcgactgtctgtcctctgtgagtgctatgacgcgggctgtgcttggtatgagctcacgcccgccgagaccacagttaggctacgagcgtacatgaacaccccggggcttcccgtgtgccaggaccaccttgaattttgggagggcgttttacgggccttacccatatagatgcccacttcctatcccagacaaagcagagtggggagaaccttccttacctggtagcgtaccaagccaccgtgtgcgctagggctcaagcccctcccccgtcgtggaccagatgtggaagtgtttagtccgcctcaagcccaccctccatgggccaacacccctgctatacagattgggcgctgttcagaatgaagtcaccctgacacacccaatcacaaaatacatcatgacatgtatgtcggcga

SEQ ID NO: 348 - DNA, 5221 bp, Hepatitis C virus; identical to SEQ ID NO: 201

SEQ ID NO: 349 - DNA, 4869 bp, Hepatitis C virus; identical to SEQ ID NO: 194

SEQ ID NO: 350 - DNA, 4869 bp, Hepatitis C virus
tcgcccacaggacgtcaagttcccgggtggcggtcagatcgttggtggagtttacttgttgccgcgcaggggccctagattgggtgtgcgcgcgacgaggaagacttccgagcggtcgcaacctcgagtagacgtcagcctatccccaaggcacgtcggcccgagggcaggacctgggctcagcccgggtacccctggcccctctatggcaatgagggctgcgggtgggcgggatggctcctgtctccccgtggtctcggcctaactggggccccacagacccccggcgtaggtcgcgtaatttgggtaaggtcatcgatacccttacatgcggcttcgccgacctcatggggtacataccgctcgtcggcgcccctcttgggggcgctgccaggccctggcgcatggcgtccgggttctggaagacggcgtgaactatgcaacagggaaccttcctggttgctctttctctatcttccttctggctttgctctcttgcctgactgtgcctgcttcagcctacaagtgcgcaactccacggggctttatcatgtcaccaatgattgccctaactcgagtattgtgtacgaggcggacgatgctatcctgcacactccggggtgtgtcccttgcgtccgcgagggtaacggctcgaggtgttggtggcgataacccccacggtggccaccagggacggcaaactccccacagtgcagcttcgacgtcacatcgatctgctcgtcgggagcgctaccctttgttcggccctttacgtgggggacctgtgcggtctgtctttcttgtcggccaactgttcaccttctctcccaggcgccactggacaacgcaggactgcaattgttccatctatcccggccatataacgggtcaccgtatggcatgggacatgatgatgaactggtcccctacgcggcgctggtagtagctcagatgctccggatcccacaagccatcctggacatgatcgctggtgctcactggggagtcctggcgggcatagcgtatttctccatggtggggaactgggcgaaggtcctgtagtgctgctgctatttgccggcgtcgacgcgggaacccacgtcaccgggggcattgccgcccgtaccacgtctagaattgctggtctcttcaacccaggcgcccagcaggacatccagctggttaacaccaacggcagtggcacatcaacagaacggccttgaactgtaacgatagccttcacaccggctggatagcggggcttttctatcgctacaaattcaactcttcaggctgtcccgagaggttggccagctgccgacccctaccgattttgcccagggctggggccctattagttacgccaacggaagcggccccgaccaacgcccctactgctggcactatcccccaaagccttgcggcattgtgcccgcacagagcgtgtgtggcccggtgtattgcttcctcccagccccgtggtggtgggaacgaccgacaaggcgggcgcgcctacctacagatggggtgcaaacgatacggacgtcttcgtccttaacaacaccaggccaccactgggcaattggttcggttgacctggatgaactcaactggatacaccaaagtgtgcggggcgcccccctgcgtcatcggaggggtgggcaacaagaccttgcactgccccaccgattgtttccgcaagcatccggaagccacatactctcggtgcggctccgtccctggattacacccaggtgtctggtcgactatccgtataggctttggcattacccttgtaccatcaactacaccgtgttcaaagtcaggatgtacgtgggaggggtcgagcataggctggaggcgcctgcaactggacgcggggcgaacgttgcaatctggaagacagggacaggtccgagctcagcccgttgctgctgtccaccacacagtggcaagtccttccgtgttccttcacgaccctgccagccttgtccaccggcctctccacctccaccagaacattgtggacgtgcagtacttatacggggtggggtcaagcatcgcgtcctgggccatcaagtgggagtacgtcgttctcctattccttctgctcgcagacgcgcgcgtctgtcctgcttgtggatgatgttactcatatcccaagcggaggcggctttggagaacctcgtagtgctcaatgcagcatctttggccgggacacacggtcttgtgtccctcctcgtgttcttctgctttgcgtggtacctgaaggtaggtgggtgcccggagcggtctacgccctctacgggatgtggcctctcctcctgctcctattggcgttgccccagcgggcatatgcgttggacacggaggtggccgcgtcgtgtggcggcgctgtcttgtcgggttgatggcgctgactctgtcaccatattacaagcgctatgtcagctggtgcttatggtggcttcagtactttctgaccagagcagaagcgcaactgcacgtgtgggttccccctctcgacgtccgagggggggcgacgccgtcatcttactcatgtgtgctgtacgcccggctttggtgtttgacatcaccaagctgctgctggccgtcctcggacccctctggattctccaagccagtttgcttaaagtgccctacttgtgcgcgttcaaggccttctccggatctgcgcgctagcgcggaagatggcggggggtcattacgtgcaaatggtcatcatcaagttgggggcgctcactggcacttatgtgtataaccatctcactcctcttcgggactggcgcacaacggcctgcgagatctggctgtggctgtagagccagtcgtcttctcccgaatggagaccaacctcatcacgtggggggcagacaccgccgcatgcggcgacatcatcaacggcttgcccgttccgcccgcaggggccgggagatactgctcggaccagccgacggaatggtctccaaggggtggaggttgctggcacccatcacggcatacgcccagcagacaaggggcctcctagggtgtataatcaccagcctaaccggcgggacaaaaatcaggtggagggtgaggtccagattgtgtcaactgctgcccaaacctttctggcaacgtgcatcaatggagtatgctggaccgtctatcacggggccggaacgaggaccatcgcatccccaagggtcctgttatccagatgtacaccaatgtagataaagatctcgtgggttggcccgctcctcaaggttcccgttctttggcaccctgcacctgcggctcctcggacctttatctggtcacgaggcacgccgatgtcttcccgtgcgccggcggggtgatagcaggggcagcctgctttcgccccggcccatttcctacttgaaaggctcctcggggggtccgctgttgtgccccgcggggcacgccgtgggcattttcagggcgcggtgtgcacccgtggagtggctaaggcagtggactttatccctgtagagaacctagagacaaccatgaggtccccggtgttcacggacaactcctctccaccagcagtaccccagagcttccaggtggcccacctgcatctcccacaggcagcggcaagagcaccaaggtcccagctgcatacgcagctcagggctataaggtgctagtgctcaacccctctgttgctgcaacactaggcttcggtgcttatatgtccaaggcccagggatcgaccctaacatcaggaccggggtgagaacaattaccactggcagccccatcacgtactccacctacggcaagttccttgccgacggcgggtgctcagggggtgcttatgacataataatctgtgacgagtgccacccacggatgccacgtccatcttaggcatcggcaccgtccttgaccaagcagagaccgcaggggcgaggcttgttgtgctcgccaccgctacccctccgggctccatcactgtgccccatcctaacatgaggaggttgctctgtccaccaccggagagatccccttttatggcaaggctatccccctcgaagtaatcaagggggggaggcatctcatcttctgtcattcaaagaagaagtgtgacgagctcgctgcaaagctggttgcatgggcgtcaatgccgtggcctattaccgcggtcttgacgtgtctgtcatcccgaccagcggcgatgttgtcgtcgtggcaactgatgctctcatgaccggctataccggcgacttcgactcggtgatgactgcaacacgtgtgtcatccagacagtcgatttcagccttgaccccaccttcaccattgagacaaccacgcttccccaggatgctgtctcccgtacacaacggcggggcaggactggcagggggaagccaggcacctacggtttgtggcaccgggggagcgcccctctggcatgttcgactcgtctgtcctctgtgagtgctatgacgcgggctgtgcttggtatgagctcacgcccgccgagaccacagttaggctacgagcgtaatgaacaccccggggcttcccgtgtgccaggaccaccttgaattttgggagggcgtctttacgggccttacccatatagatgcccacttcctatcccagacaaagcagagtggggagaaccttccttacctggtagcgtacaagccaccgtgtgcgctagggctcaagcccctcccccgtcgtgggaccagatgtggaagtgtttagtccgcctcaagcccaccctccatgggccaacacccctgctatacagattgggcgctgttcaaatgaagtcaccctgacacacccaatcacaaaatacatcatgacatgtatgtcggctga

SEQ ID NO: 351 - DNA, 4869 bp, Hepatitis C virus; identical to SEQ ID NO: 194

SEQ ID NO: 352 - DNA, 4869 bp, Hepatitis C virus; identical to SEQ ID NO: 194

SEQ ID NO: 353 - DNA, 4869 bp, Hepatitis C virus
tcgcccacaggacgtcaagttcccgggtggcggtcagatcgttggtggagtttacttgttgccgcgcaggggccctagattgggtgtgcgcgcgacgaggaagacttccgagcggtcgcaacctcgagtagacgtcagcctatccccaaggcacgtcggcccgagggcaggacctgggctcagcccgggtacccctggcccctctatggcaatgagggctgcgggtgggcgggatggctcctgtctccccgtggtctcggcctaactggggccccacagacccccggcgtaggtcgcgtaatttgggtaaggtcatcgatacccttacatgcggcttcgccgacctcatggggtacataccgctcgtcggcgcccctcttgggggcgctgccaggccctggcgcatggcgtccgggttctggaagacggcgtgaactatgcaacagggaaccttcctggttgctctttctctatcttccttctggctttgctctcttgcctgactgtgcctgcttcagcctacaagtgcgcaactccacggggctttatcatgtcaccaatgattgccctaactcgagtattgtgtacgaggcggacgatgctatcctgcacactccggggtgtgtcccttgcgtccgcgagggtaacggctcgaggtgttggtggcgataacccccacggtggccaccagggacggcaaactccccacagtgcagcttcgacgtcacatcgatctgctcgtcgggagcgctaccctttgttcggccctttacgtgggggacctgtgcggtctgtctttcttgtcggccaactgttcaccttctctcccaggcgccactggacaacgcaggactgcaattgttccatctatcccggccatataacgggtcaccgtatggcatgggacatgatgatgaactggtcccctacgcggcgctggtagtagctcagatgctccggatcccacaagccatcctggacatgatcgctggtgctcactggggagtcctggcgggcatagcgtatttctccatggtggggaactgggcgaaggtcctgtagtgctgctgctatttgccggcgtcgacgcgggaacccacgtcaccgggggcattgccgcccgtaccacgtctagaattgctggtctcttcaacccaggcgcccagcaggacatccagctggttaacaccaacggcagtggcacatcaacagaacggccttgaactgtaacgatagccttcacaccggctggatagcggggcttttctatcgctacaaattcaactcttcaggctgtcccgagaggttggccagctgccgacccctaccgattttgcccagggctggggccctattagttacgccaacggaagcggccccgaccaacgcccctactgctggcactatcccccaaagccttgcggcattgtgcccgcacagagcgtgtgtggcccggtgtattgcttcctcccagccccgtggtggtgggaacgaccgacaaggcgggcgcgcctacctacagatggggtgcaaacgatacggacgtcttcgtccttaacaacaccaggccaccactgggcaattggttcggttgacctggatgaactcaactggatacaccaaagtgtgcggggcgcccccctgcgtcatcggaggggtgggcaacaagaccttgcactgccccaccgattgtttccgcaagcatccggaagccacatactctcggtgcggctccgtccctggattacacccaggtgtctggtcgactatccgtataggctttggcattacccttgtaccatcaactacaccgtgttcaaagtcaggatgtacgtgggaggggtcgagcataggctggaggcgcctgcaactggacgcggggcgaacgttgcaatctggaagacagggacaggtccgagctcagcccgttgctgctgtccaccacacagtggcaagtccttccgtgttccttcacgaccctgccagccttgtccaccggcctctccacctccaccagaacattgtggacgtgcagtacttatacggggtggggtcaagcatcgcgtcctgggccatcaagtgggagtacgtcgttctcctattccttctgctcgcagacgcgcgcgtctgtcctgcttgtggatgatgttactcatatcccaagcggaggcggctttggagaacctcgtagtgctcaatgcagcatctttggccgggacacacggtcttgtgtccctcctcgtgttcttctgctttgcgtggtacctgaaggtaggtgggtgcccggagcggtctacgccctctacgggatgtggcctctcctcctgctcctattggcgttgccccagcgggcatatgcgttggacacggaggtggccgcgtcgtgtggcggcgctgtcttgtcgggttgatggcgctgactctgtcaccatattacaagcgctatgtcagctggtgcttatggtggcttcagtactttctgaccagagcagaagcgcaactgcacgtgtgggttccccctctcgacgtccgagggggggcgacgccgtcatcttactcatgtgtgctgtacgcccggctttggtgtttgacatcaccaagctgctgctggccgtcctcggacccctctggattctccaagccagtttgcttaaagtgccctacttgtgcgcgttcaaggccttctccggatctgcgcgctagcgcggaagatggcggggggtcattacgtgcaaatggtcatcatcaagttgggggcgctcactggcacttatgtgtataaccatctcactcctcttcgggactggcgcacaacggcctgcgagatctggctgtggctgtagagccagtcgtcttctcccgaatggagaccaacctcatcacgtggggggcagacaccgccgcatgcggcgacatcatcaacggcttgcccgttccgcccgcaggggccgggagatactgctcggaccagccgacggaatggtctccaaggggtggaggttgctggcacccatcacggcatacgcccagcagacaaggggcctcctagggtgtataatcaccagcctaaccggcgggacaaaaatcaggtggagggtgaggtccagattgtgtcaactgctgcccaaacctttctggcaacgtgcatcaatggagtatgctggaccgtctaccacggggccggaacgaggaccatcgcatccccaagggtcctgttatccagatgtacaccaatgtagataaagatctcgtgggttggcccgctcctcaaggttcccgttctttggcaccctgcacctgcggctcctcggacctttatctggtcacgaggcacgccgatgtcttcccgtgcgccggcggggtgatagcaggggcagcctgctttcgccccggcccatttcctacttgaaaggctcctcggggggtccgctgttgtgccccgcggggcacgccgtgggcattttcagggcgcggtgtgcacccgtggagtggctaaggcagtggactttatccctgtagagaacctagagacaaccatgaggtccccggtgttcacggacaactcctctccaccagcagtaccccagagcttccaggtggcccacctgcatctcccacaggcagcggcaagagcaccaaggtcccagctgcatacgcagctcagggctataatgtgctagtgctcaacccctctgttgctgcaacactaggcttcggtgcttatatgtccaaggcccagggatcgaccctaacatcaggaccggggtgagaacaattaccactggcagccccatcacgtactccacctacggcaagttccttgccgacggcgggtgctcagggggtgcttatgacataataatctgtgacgagtgccacccacggatgccacgtccatcttaggcatcggcaccgtccttgaccaagcagagaccgcaggggcgaggcttgttgtgctcgccaccgctacccctccgggctccatcactgtgccccatcctaacatgaggaggttgctctgtccaccaccggagagatccccttttatggcaaggctatccccctcgaagtaatcaagggggggaggcatctcatcttctgtcattcaaagaagaagtgtgacgagctcgctgcaaagctggttgcatgggcgtcaatgccgtggcctattaccgcggtcttgacgtgtctgtcatcccgaccagcggcgatgttgtcgtcgtggcaactgatgctctcatgaccggctataccggcgacttcgactcggtgatgactgcaacacgtgtgtcacccagacagtcgatttcagccttgaccccaccttcaccattgagacaaccacgcttccccaggatgctgtctcccgtacacaacggcggggcaggactggcagggggaagccaggcacctacggtttgtggcaccgggggagcgcccctctggcatgttcgactcgtctgtcctctgtgagtgctatgacgcgggctgtgcttggtatgagctcacgcccgccgagaccacagttaggctacgagcgtaatgaacaccccggggcttcccgtgtgccaggaccaccttgaattttgggagggcgtctttacgggccttacccatatagatgcccacttcctatcccagacaaagcagagtggggagaaccttccttacctggtagcgtacaagccaccgtgtgcgctagggctcaagcccctcccccgtcgtgggaccagatgtggaagtgtttagtccgcctcaagcccaccctccatgggccaacacccctgctatacagattgggcgctgttcaaatgaagtcaccctgacacacccaatcacaaaatacatcatgacatgtatgtcggctga

SEQ ID NO: 354 - DNA, 4869 bp, Hepatitis C virus
tcgcccacaggacgtcaagttcccgggtggcggtcagatcgttggtggagtttacttgttgccgcgcaggggccctagattgggtgtgcgcgcgacgaggaagacttccgagcggtcgcaacctcgagtagacgtcagcctatccccaaggcacgtcggcccgagggcaggacctgggctcagcccgggtacccctggcccctctatggcaatgagggctgcgggtgggcgggatggctcctgtctccccgtggtctcggcctaactggggccccacagacccccggcgtaggtcgcgtaatttgggtaaggtcatcgatacccttacatgcggcttcgccgacctcatggggtacataccgctcgtcggcgcccctcttgggggcgctgccaggccctggcgcatggcgtccgggttctggaagacggcgtgaactatgcaacagggaaccttcctggttgctctttctctatcttccttctggctttgctctcttgcctgactgtgcctgcttcagcctacaagtgcgcaactccacggggctttatcatgtcaccaatgattgccctaactcgagtattgtgtacgaggcggacgatgctatcctgcacactccggggtgtgtcccttgcgtccgcgagggtaacggctcgaggtgttggtggcgataacccccacggtggccaccagggacggcaaactccccacagtgcagcttcgacgtcacatcgatctgctcgtcgggagcgctaccctttgttcggccctttacgtgggggacctgtgcggtctgtctttcttgtcggccaactgttcaccttctctcccaggcgccactggacaacgcaggactgcaattgttccatctatcccggccatataacgggtcaccgtatggcatgggacatgatgatgaactggtcccctacgcggcgctggtagtagctcagatgctccggatcccacaagccatcctggacatgatcgctggtgctcactggggagtcctggcgggcatagcgtatttctccatggtggggaactgggcgaaggtcctgtagtgctgctgctatttgccggcgtcgacgcgggaacccacgtcaccgggggcattgccgcccgtaccacgtctagaattgctggtctcttcaacccaggcgcccagcaggacatccagctggttaacaccaacggcagtggcacatcaacagaacggccttgaactgtaacgatagccttcacaccggctggatagcggggcttttctatcgctacaaattcaactcttcaggctgtcccgagaggttggccagctgccgacccctaccgattttgcccagggctggggccctattagttacgccaacggaagcggccccgaccaacgcccctactgctggcactatcccccaaagccttgcggcattgtgcccgcacagagcgtgtgtggcccggtgtattgcttcctcccagccccgtggtggtgggaacgaccgacaaggcgggcgcgcctacctacagatggggtgcaaacgatacggacgtcttcgtccttaacaacaccaggccaccactgggcaattggttcggttgacctggatgaactcaactggatacaccaaagtgtgcggggcgcccccctgcgtcatcggaggggtgggcaacaagaccttgcactgccccaccgattgtttccgcaagcatccggaagccacatactctcggtgcggctccgtccctggattacacccaggtgtctggtcgactatccgtataggctttggcattacccttgtaccatcaactacaccgtgttcaaagtcaggatgtacgtgggaggggtcgagcataggctggaggcgcctgcaactggacgcggggcgaacgttgcaatctggaagacagggacaggtccgagctcagcccgttgctgctgtccaccacacagtggcaagtccttccgtgttccttcacgaccctgccagccttgtccaccggcctctccacctccaccagaacattgtggacgtgcagtacttatacggggtggggtcaagcatcgcgtcctgggccatcaagtgggagtacgtcgttctcctattccttctgctcgcagacgcgcgcgtctgtcctgcttgtggatgatgttactcatatcccaagcggaggcggctttggagaacctcgtagtgctcaatgcagcatctttggccgggacacacggtcttgtgtccctcctcgtgttcttctgctttgcgtggtacctgaaggtaggtgggtgcccggagcggtctacgccctctacgggatgtggcctctcctcctgctcctattggcgttgccccagcgggcatatgcgttggacacggaggtggccgcgtcgtgtggcggcgctgtcttgtcgggttgatggcgctgactctgtcaccatattacaagcgctatgtcagctggtgcttatggtggcttcagtactttctgaccagagcagaagcgcaactgcacgtgtgggttccccctctcgacgtccgagggggggcgacgccgtcatcttactcatgtgtgctgtacgcccggctttggtgtttgacatcaccaagctgctgctggccgtcctcggacccctctggattctccaagccagtttgcttaaagtgccctacttgtgcgcgttcaaggccttctccggatctgcgcgctagcgcggaagatggcggggggtcattacgtgcaaatggtcatcatcaagttgggggcgctcactggcacttatgtgtataaccatctcactcctcttcgggactggcgcacaacggcctgcgagatctggctgtggctgtagagccagtcgtcttctcccgaatggagaccaacctcatcacgtggggggcagacaccgccgcatgcggcgacatcatcaacggcttgcccgttccgcccgcaggggccgggagatactgctcggaccagccgacggaatggtctccaaggggtggaggttgctggcacccatcacggcatacgcccagcagacaaggggcctcctagggtgtataatcaccagcctaaccggcgggacaaaaatcaggtggagggtgaggtccagattgtgtcaactgctgcccaaacctttctggcaacgtgcatcaatggagtatgctggaccgtctaccacggggccggaacgaggaccatcgcatccccaagggtcctgttatccagatgtacaccaatgtagataaagatctcgtgggttggcccgctcctcaaggttcccgttctttggcaccctgcacctgcggctcctcggacctttatctggtcacgaggcacgccgatgtcttcccgtgcgccggcggggtgatagcaggggcagcctgctttcgccccggcccatttcctacttgaaaggctcctcggggggtccgctgttgtgccccgcggggcacgccgtgggcattttcagggcgcggtgtgcacccgtggagtggctaaggcagtggactttatccctgtagagaacctagagacaaccatgaggtccccggtgttcacggacaactcctctccaccagcagtaccccagagcttccaggtggcccacctgcatctcccacaggcagcggcaagagcaccaaggtcccagctgcatacgcagctcagggctataaggtgctagtgctcaacccctctgttgctgcaacactaggcttcggtgcttatatgtccaaggcccagggatcgaccctaacatcaggaccggggtgagaacaattaccactggcagccccatcacgtactccacctacggcaagttccttgccgacggcgggtgctcagggggtgcttatgacataataatctgtgacgagtgccacccacggatgccacgtccatcttaggcatcggcaccgtccttgaccaagcagagaccgcaggggcgaggcttgttgtgctcgccaccgctacccctccgggctccatcactgtgccccatcctaacatgaggaggttgctctgtccaccaccggagagatccccttttatggcaaggctatccccctcgaagtaatcaagggggggaggcatctcatcttctgtcattcaaagaagaagtgtgacgagctcgctgcaaagctggttgcatgggcgtcaatgccgtggcctattaccgcggtcttgacgtgtctgtcatcccgaccagcggcgatgttgtcgtcgtggcaactgatgctctcatgaccggctataccggcgacttcgactcggtgatgactgcaacacgtgtgtcacccagacagtcgatttcagccttgaccccaccttcaccattgagacaaccacgcttccccaggatgctgtctcccgtacacaacggcggggcaggactggcagggggaagccaggcacctacggtttgtggcaccgggggagcgcccctctggcatgttcgactcgtctgtcctctgtgagtgctatgacgcgggctgtgcttggtatgagctcacgcccgccgagaccacagttaggctacgagcgtaatgaacaccccggggcttcccgtgtgccaggaccaccttgaattttgggagggcgtctttacgggccttacccatatagatgcccacttcctatcccagacaaagcagagtggggagaaccttccttacttggtagcgtacaagccaccgtgtgcgctagggctcaagcccctcccccgtcgtgggaccagatgtggaagtgtttagtccgcctcaagcccaccctccatgggccaacacccctgctatacagattgggcgctgttcaaatgaagtcaccctgacacacccaatcacaaaatacatcatgacatgtatgtcggctga

SEQ ID NO: 355 - DNA, 4869 bp, Hepatitis C virus
tcgcccacaggacgtcaagttcccgggtggcggtcagatcgttggtggagtttacttgttgccgcgcaggggccctagattgggtgtgcgcgcgacgaggaagacttccgagcggtcgcaacctcgagtagacgtcagcctatccccaaggcacgtcggcccgagggcaggacctgggctcagcccgggtacccctggcccctctatggcaatgagggctgcgggtgggcgggatggctcctgtctccccgtggtctcggcctaactggggccccacagacccccggcgtaggtcgcgtaatttgggtaaggtcatcgatacccttacatgcggcttcgccgacctcatggggtacataccgctcgtcggcgcccctcttgggggcgctgccaggccctggcgcatggcgtccgggttctggaagacggcgtgaactatgcaacagggaaccttcctggttgctctttctctatcttccttctggctttgctctcttgcctgactgtgcctgcttcagcctacaagtgcgcaactccacggggctttatcatgtcaccaatgattgccctaactcgagtattgtgtacgaggcggacgatgctatcctgcacactccggggtgtgtcccttgcgtccgcgagggtaacggctcgaggtgttggtggcgataacccccacggtggccaccagggacggcaaactccccacagtgcagcttcgacgtcacatcgatctgctcgtcgggagcgctaccctttgttcggccctttacgtgggggacctgtgcggtctgtctttcttgtcggccaactgttcaccttctctcccaggcgccactggacaacgcaggactgcaattgttccatctatcccggccatataacgggtcaccgtatggcatgggacatgatgatgaactggtcccctacgcggcgctggtagtagctcagatgctccggatcccacaagccatcctggacatgatcgctggtgctcactggggagtcctggcgggcgtagcgtatttctccatggtggggaactgggcgaaggtcctgtagtgctgctgctatttgccggcgtcgacgcgggaacccacgtcaccgggggcattgccgcccgtaccacgtctagaattgctggtctcttcaacccaggcgcccagcaggacatccagctggttaacaccaacggcagtggcacatcaacagaacggccttgaactgtaacgatagccttcacaccggctggatagcggggcttttctatcgctacaaattcaactcttcaggctgtcccgagaggttggccagctgccgacccctaccgattttgcccagggctggggccctattagttacgccaacggaagcggccccgaccaacgcccctactgctggcactatcccccaaagccttgcggcattgtgcccgcacagagcgtgtgtggcccggtgtattgcttcctcccagccccgtggtggtgggaacgaccgacaaggcgggcgcgcctacctacagatggggtgcaaacgatacggacgtcttcgtccttaacaacaccaggccaccactgggcaattggttcggttgacctggatgaactcaactggatacaccaaagtgtgcggggcgcccccctgcgtcatcggaggggtgggcaacaagaccttgcactgccccaccgattgtttccgcaagcatccggaagccacatactctcggtgcggctccgtccctggattacacccaggtgtctggtcgactatccgtataggctttggcattacccttgtaccatcaactacaccgtgttcaaagtcaggatgtacgtgggaggggtcgagcataggctggaggcgcctgcaactggacgcggggcgaacgttgcaatctggaagacagggacaggtccgagctcagcccgttgctgctgtccaccacacagtggcaagtccttccgtgttccttcacgaccctgccagccttgtccaccggcctctccacctccaccagaacattgtggacgtgcagtacttatacggggtggggtcaagcatcgcgtcctgggccatcaagtgggagtacgtcgttctcctattccttctgctcgcagacgcgcgcgtctgtcctgcttgtggatgatgttactcatatcccaagcggaggcggctttggagaacctcgtagtgctcaatgcagcatctttggccgggacacacggtcttgtgtccctcctcgtgttcttctgctttgcgtggtacctgaaggtaggtgggtgcccggagcggtctacgccctctacgggatgtggcctctcctcctgctcctattggcgttgccccagcgggcatatgcgttggacacggaggtggccgcgtcgtgtggcggcgctgtcttgtcgggttgatggcgctgactctgtcaccatattacaagcgctatgtcagctggtgcttatggtggcttcagtactttctgaccagagcagaagcgcaactgcacgtgtgggttccccctctcgacgtccgagggggggcgacgccgtcatcttactcatgtgtgctgtacgcccggctttggtgtttgacatcaccaagctgctgctggccgtcctcggacccctctggattctccaagccagtttgcttaaagtgccctacttgtgcgcgttcaaggccttctccggatctgcgcgctagcgcggaagatggcggggggtcattacgtgcaaatggtcatcatcaagttgggggcgctcactggcacttatgtgtataaccatctcactcctcttcgggactggcgcacaacggcctgcgagatctggctgtggctgtagagccagtcgtcttctcccgaatggagaccaacctcatcacgtggggggcagacaccgccgcatgcggcgacatcatcaacggcttgcccgttccgcccgcaggggccgggagatactgctcggaccagccgacggaatggtctccaaggggtggaggttgctggcacccatcacggcatacgcccagcagacaaggggcctcctagggtgtataatcaccagcctaaccggcgggacaaaaatcaggtggagggtgaggtccagattgtgtcaactgctgcccaaacctttctggcaacgtgcatcaatggagtatgctggaccgtctaccacggggccggaacgaggaccatcgcatccccaagggtcctgttatccagatgtacaccaatgtagataaagatctcgtgggttggcccgctcctcaaggttcccgttctttggcaccctgcacctgcggctcctcggacctttatctggtcacgaggcacgccgatgtcttcccgtgcgccggcggggtgatagcaggggcagcctgctttcgccccggcccatttcctacttgaaaggctcctcggggggtccgctgttgtgccccgcggggcacgccgtgggcattttcagggcgcggtgtgcacccgtggagtggctaaggcagtggactttatccctgtagagaacctagagacaaccatgaggtccccggtgttcacggacaactcctctccaccagcagtaccccagagcttccaggtggcccacctgcatctcccacaggcagcggcaagagcaccaaggtcccagctgcatacgcagctcagggctataaggtgctagtgctcaacccctctgttgctgcaacactaggcttcggtgcttatgtgtccaaggcccagggatcgaccctaacatcaggaccggggtgagaacaattaccactggcagccccatcacgtactccacctacggcaagttccttgccgacggcgggtgctcagggggtgcttatgacataataatctgtgacgagtgccacccacggatgccacgtccatcttaggcatcggcaccgtccttgaccaagcagagaccgcaggggcgaggcttgttgtgctcgccaccgctacccctccgggctccatcactgtgccccatcctaacatgaggaggttgctctgtccaccaccggagagatccccttttatggcaaggctatccccctcgaagtaatcaagggggggaggcatctcatcttctgtcattcaaagaagaagtgtgacgagctcgctgcaaagctggttgcatgggcgtcaatgccgtggcctattaccgcggtcttgacgtgtctgtcatcccgaccagcggcgatgttgtcgtcgtggcaactgatgctctcatgaccggctataccggcgacttcgactcggtgatgactgcaacacgtgtgtcacccagacagtcgatttcagccttgaccccaccttcaccattgagacaaccacgcttccccaggatgctgtctcccgtacacaacggcggggcaggactggcagggggaagccaggcacctacggtttgtggcaccgggggagcgcccctctggcatgttcgactcgtctgtcctctgtgagtgctatgacgcgggctgtgcttggtatgagctcacgcccgccgagaccacagttaggctacgagcgtaatgaacaccccggggcttcccgtgtgccaggaccaccttgaattttgggagggcgtctttacgggccttacccatatagatgcccacttcctatcccagacaaagcagagtggggagaaccttccttacctggtagcgtacaagccaccgtgtgcgctagggctcaagcccctcccccgtcgtgggaccagatgtggaagtgtttagtccgcctcaagcccaccctccatgggccaacacccctgctatacagattgggcgctgttcaaatgaagtcaccctgacacacccaatcacaaaatacatcatgacatgtatgtcggctga

SEQ ID NO: 356 - DNA, 4869 bp, Hepatitis C virus
tcgcccacaggacgtcaagttcccgggtggcggtcagatcgttggtggagtttacttgttgccgcgcaggggccctagattgggtgtgcgcgcgacgaggaagacttccgagcggtcgcaacctcgagtagacgtcagcctatccccaaggcacgtcggcccgagggcaggacctgggctcagcccgggtacccctggcccctctatggcaatgagggctgcgggtgggcgggatggctcctgtctccccgtggtctcggcctaactggggccccacagacccccggcgtaggtcgcgtaatttgggtaaggtcatcgatacccttacatgcggcttcgccgacctcatggggtacataccgctcgtcggcgcccctcttgggggcgctgccaggccctggcgcatggcgtccgggttctggaagacggcgtgaactatgcaacagggaaccttcctggttgctctttctctatcttccttctggctttgctctcttgcctgactgtgcctgcttcagcctacaagtgcgcaactccacggggctttatcatgtcaccaatgattgccctaactcgagtattgtgtacgaggcggacgatgctatcctgcacactccggggtgtgtcccttgcgtccgcgagggtaacggctcgaggtgttggtggcgataacccccacggtggccaccagggacggcaaactccccacagtgcagcttcgacgtcacatcgatctgctcgtcgggagcgctaccctttgttcggccctttacgtgggggacctgtgcggtctgtctttcttgtcggccaactgttcaccttctctcccaggcgccactggacaacgcaggactgcaattgttccatctatcccggccatataacgggtcaccgtatggcatgggacatgatgatgaactggtcccctacgcggcgctggtagtagctcagatgctccggatcccacaagccatcctggacatgatcgctggtgctcactggggagtcctggcgggcatagcgtatttctccatggtggggaactgggcgaaggtcctgtagtgctgctgctatttgccggcgtcgacgcgggaacccacgtcaccgggggcattgccgcccgtaccacgtctagaattgctggtctcttcaacccaggcgcccagcaggacatccagctggttaacaccaacggcagtggcacatcaacagaacggccttgaactgtaacgatagccttcacaccggctggatagcggggcttttctatcgctacaaattcaactcttcaggctgtcccgagaggttggccagctgccgacccctaccgattttgcccagggctggggccctattagttacgccaacggaagcggccccgaccaacgcccctactgctggcactatcccccaaagccttgcggcattgtgcccgcacagagcgtgtgtggcccggtgtattgcttcctcccagccccgtggtggtgggaacgaccgacaaggcgggcgcgcctacctacagatggggtgcaaacgatacggacgtcttcgtccttaacaacaccaggccaccactgggcaattggttcggttgacctggatgaactcaactggatacaccaaagtgtgcggggcgcccccctgcgtcatcggaggggtgggcaacaagaccttgcactgccccaccgattgtttccgcaagcatccggaagccacatactctcggtgcggctccgtccctggattacacccaggtgtctggtcgactatccgtataggctttggcattacccttgtaccatcaactacaccgtgttcaaagtcaggatgtacgtgggaggggtcgagcataggctggaggcgcctgcaactggacgcggggcgaacgttgcaatctggaagacagggacaggtccgagctcagcccgttgctgctgtccaccacacagtggcaagtccttccgtgttccttcacgaccctgccagccttgtccaccggcctctccacctccaccagaacattgtggacgtgcagtacttatacggggtggggtcaagcatcgcgtcctgggccatcaagtgggagtacgtcgttctcctattccttctgctcgcagacgcgcgcgtctgtcctgcttgtggatgatgttactcatatcccaagcggaggcggctttggagaacctcgtagtgctcaatgcagcatctttggccgggacacacggtcttgtgtccctcctcgtgttcttctgctttgcgtggtacctgaaggtaggtgggtgcccggagcggtctacgccctctacgggatgtggcctctcctcctgctcctattggcgttgccccagcgggcatatgcgttggacacggaggtggccgcgtcgtgtggcggcgctgtcttgtcgggttaatggcgctgactctgtcaccatattacaagcgctatgtcagctggtgcttatggtggcttcagtactttctgaccagagcagaagcgcaactgcacgtgtgggttccccctctcgacgtccgagggggggcgacgccgtcatcttactcatgtgtgctgtacgcccggctttggtgtttgacatcaccaagctgctgctggccgtcctcggacccctctggattctccaagccagtttgcttaaagtgccctacttgtgcgcgttcaaggccttctccggatctgcgcgctagcgcggaagatggcggggggtcattacgtgcaaatggtcatcatcaagttgggggcgctcactggcacttatgtgtataaccatctcactcctcttcgggactggcgcacaacggcctgcgagatctggctgtggctgtagagccagtcgtcttctcccgaatggagaccaacctcatcacgtggggggcagacaccgccgcatgcggcgacatcatcaacggcttgcccgttccgcccgcaggggccgggagatactgctcggaccagccgacggaatggtctccaaggggtggaggttgctggcacccatcacggcatacgcccagcagacaaggggcctcctagggtgtataatcaccagcctaaccggcgggacaaaaatcaggtggtgggtgaggtccagattgtgtcaactgctgcccaaacctttctggcaacgtgcatcaatggagtatactggaccgtctaccacggggccggaacgaggaccatcgcatccccaagggtcctgttatccagatgtacaccaatgtagataaagatctcgtgggttggcccgctcctcaaggttcccgttctttggcaccctgcacctgcggctcctcggacctttatctggtcacgaggcacgccgatgtcttcccgtgcgccggcggggtgatagcaggggcagcctgctttcgccccggcccatttcctacttgaaaggctcctcggggggtccgctgttgtgccccgcggggcacgccgtgggcattttcagggcgcggtgtgcacccgtggagtggctaaggcagtggactttatccctgtagagaacctagagacaaccatgaggtccccggtgttcacggacaactcctctccaccagcagtaccccagagcttccaggtggcccacctgcatctcccacaggcagcggcaagagcaccaaggtcccagctgcatacgcagctcagggctataaggtgctagtgctcaacccctctgttgctgcaacactaggcttcggtgcttatatgtccaaggcccagggatcgaccctaacatcaggactggggtgagaacaattaccactggcagccccatcacgtactccacctacggcaagttccttgccgacggcgggtgctcagggggtgcttatgacataataatctgtgacgagtgccacccacggatgccacgtccatcttaggcatcggcaccgtccttgaccaagcagagaccgcaggggcgaggcttgttgtgctcgccaccgctacccctccgggctccatcactgtgccccatcctaacatgaggaggttgctctgtccaccaccggagagatccccttttatggcaaggctatccccctcgaagtaatcaagggggggaggcatctcatcttctgtcattcaaagaagaagtgtgacgagctcgctgcaaagctggttgcatgggcgtcaatgccgtggcctattaccgcggtcttgacgtgtctgtcatcccgaccagcggcgatgttgtcgtcgtggcaactgatgctctcatgaccggctataccggcgacttcgactcggtgatgactgcaacacgtgtgtcacccagacagtcgatttcagccttgaccccaccttcaccattgagacaaccacgcttccccaggatgctgtctcccgtacacaacggcggggcaggactggcagggggaagccaggcacctacggtttgtggcaccgggggagcgcccctctggcatgttcgactcgtccgtcctctgtgagtgctatgacgcgggctgtgcttggtatgagctcacgcccgccgagaccacagttaggctacgagcgtaatgaacaccccggggcttcccgtgtgccaggaccaccttgaattttgggagggcgtctttacgggccttacccatatagatgcccacttcctatcccagacaaagcagagtggggagaaccttccttacctggtagcgtacaagccaccgtgtgcgctagggctcaagcccctcccccgtcgtgggaccagatgtggaagtgtttagtccgcctcaagcccaccctccatgggccaacacccctgctatacagattgggcgctgttcaaatgaagtcaccctgacacacccaatcacaaaatacatcatgacatgtatgtcggctga

SEQ ID NO: 357 - DNA, 4869 bp, Hepatitis C virus; identical to SEQ ID NO: 224

SEQ ID NO: 358 - DNA, 4869 bp, Hepatitis C virus
tcgcccacaggacgtcaagttcccgggtggcggtcagatcgttggtggagtttacttgttgccgcgcaggggccctagattgggtgtgcgcgcgacgaggaagacttccgagcggtcgcaacctcgagtagacgtcagcctatccccaaggcacgtcggcccgagggcaggacctgggctcagcccgggtacccctggcccctctatggcaatgagggctgcgggtgggcgggatggctcctgtctccccgtggtctcggcctaactggggccccacagacccccggcgtaggtcgcgtaatttgggtaaggtcatcgatacccttacatgcggcttcgccgacctcatggggtacataccgctcgtcggcgcccctcttgggggcgctgccaggccctggcgcatggcgtccgggttctggaagacggcgtgaactatgcaacagggaaccttcctggttgctctttctctatcttccttctggctttgctctcttgcctgactgtgcctgcttcagcctacaagtgcgcaactccacggggctttatcatgtcaccaatgattgccctaactcgagtattgtgtacgaggcggacgatgctatcctgcacactccggggtgtgtcccttgcgtccgcgagggtaacggctcgaggtgttggtggcgataacccccacggtggccaccagggacggcaaactccccacagtgcagcttcgacgtcacatcgatctgctcgtcgggagcgctaccctttgttcggccctttacgtgggggacctgtgcggtctgtctttcttgtcggccaactgttcaccttctttcccaggcgccactggacaacgcaggactgcaattgttccatctatcccggccatataacgggtcaccgtatggcatgggacatgatgatgaactggtcccctacgcggcgctggtagtagctcagatgctccggatcccacaagccatcctggacatgatcgctggtgctcactggggagtcctggcgggcatagcgtatttctccatggtggggaactgggcgaaggtcctgtagtgctgctgctatttgccggcgtcgacgcgggaacccacgtcaccgggggcattgccgcccgtaccacgtctagaattgctggtctcttcaacccaggcgcccagcaggacatccagctggttaacaccaacggcagtggcacatcaacagaacggccttgaactgtaacgatagccttcacaccggctggatagcggggcttttctatcgctacaaattcaactcttcaggctgtcccgagaggttggccagctgccgacccctaccgattttgcccagggctggggccctattagttacgccaacggaagcggccccgaccaacgcccctactgctggcactatcccccaaagccttgcggcattgtgcccgcacagagcgtgtgtggcccggtgtattgcttcctcccagccccgtggtggtgggaacgaccgacaaggcgggcgcgcctacctacagatggggtgcaaacgatacggacgtcttcgtccttaacaacaccaggccaccactgggcaattggttcggttgacctggatgaactcaactggatacaccaaagtgtgcggggcgcccccctgcgtcatcggaggggtgggcaacaagaccttgcactgccccaccgattgtttccgcaagcatccggaagccacatactctcggtgcggctccgtccctggattacacccaggtgtctggtcgactatccgtataggctttggcattacccttgtaccatcaactacaccgtgttcaaagtcaggatgtacgtgggaggggtcgagcataggctggaggcgcctgcaactggacgcggggcgaacgttgcaatctgggagacagggacaggtccgagctcagcccgttgctgctgtccaccacacagtggcaagtccttccgtgttccttcacgaccctgccagccttgtccaccggcctctccacctccaccagaacattgtggacgtgcagtacttatacggggtggggtcaagcatcgcgtcctgggccatcaagtgggagtacgtcgttctcctattccttctgctcgcagacgcgcgcgtctgtcctgcttgtggatgatgttactcatatcccaagcggaggcggctttggagaacctcgtagtgctcaatgcagcatctttggccgggacacacggtcttgtgtccctcctcgtgttcttctgctttgcgtggtacctgaaggtaggtgggtgcccggagcggtctacgccctctacgggatgtggcctctcctcctgctcctattggcgttgccccagcgggcatatgcgttggacacggaggtggccgcgtcgtgtggcggcgctgtcttgtcgggttgatggcgctgactctgtcaccatattacaagcgctatgtcagctggtgcttatggtggcttcagtactttctgaccagagcagaagcgcaactgcacgtgtgggttccccctctcgacgtccgagggggggcgacgccgtcatcttactcatgtgtgctgtacgcccggctttggtgtttgacatcaccaagctgctgctggccgtcctcggacccctctggattctccaagccagtttgcttaaagtgccctacttgtgcgcgttcaaggccttctccggatctgcgcgctagcgcggaagatggcggggggtcattacgtgcaaatggtcatcatcaagttgggggcgctcactggcacttatgtgtataaccatctcactcctcttcgggactggcgcacaacggcctgcgagatctggctgtggctgtagagccagtcgtcttctcccgaatggagaccaacctcatcacgtggggggcagacaccgccgcatgcggcgacatcatcaacggcttgcccgttccgcccgcaggggccgggagatactgctcggaccagccgacggaatggtctccaaggggtggaggttgctggcacccatcacggcatacgcccagcagacaaggggcctcctagggtgtataatcaccagcctaaccggcgggacaaaaatcaggtggagggtgaggtccagattgtgtcaactgctgcccaaacctttctggcaacgtgcatcaatggagtatgctggaccgtctaccacggggccggaacgaggaccatcgcatccccaagggtcctgttatccagatgtacaccaatgtagataaagatctcgtgggttggcccgctcctcaaggttcccgttctttggcaccctgcacctgcggctcctcggacctttatctggtcacgaggcacgccgatgtcttcccgtgcgccggcggggtgatagcaggggcagcctgctttcgccccggcccatttcctacttgaaaggctcctcggggggtccgctgttgtgccccgcggggcacgccgtgggcattttcagggcgcggtgtgcacccgtggagtggctaaggcagtggactttatccctgtagagaacctagagacaaccatgaggtccccggtgttcacggacaactcctctccaccagcagtaccccagagcttccaggtggcccacctgcatctcccacaggcagcggcaagagcaccaaggtcccagctgcatacgcagctcagggctataaggtgctagtgctcaacccctctgttgctgcaacactaggcttcggtgcttatatgtccaaggcccagggatcgaccctaacatcaggaccggggtgagaacaattaccactggcagccccatcacgtactccacctacggcaagttccttgccgacggcgggtgctcagggggtgcttatgacataataatctgtgacgagtgccacccacggatgccacgtccatcttaggcatcggcaccgtccttgaccaagcagagaccgcaggggcgaggcttgttgtgctcgccaccgctacccctccgggctccatcactgtgccccatcctaacatgaggaggttgctctgtccaccaccggagagatccccttttatggcaaggctatccccctcgaagtaatcaagggggggaggcatctcatcttctgtcattcaaagaagaagtgtgacgagctcgctgcaaagctggttgcatgggcgtcaatgccgtggcctattaccgcggtcttgacgtgtctgtcatcccgaccagcggcgatgttgtcgtcgtggcaactgatgctctcatgaccggctataccggcgacttcgactcggtgatgactgcaacacgtgtgtcacccagacagtcgatttcagccttgaccccaccttcaccattgagacaaccacgcttccccaggatgctgtctcccgtacacaacggcggggcaggactggcagggggaagccaggcacctacggtttgtggcaccgggggagcgcccctctggcatgttcgactcgtctgtcctctgtgagtgctatgacgcgggctgtgcttggtatgagctcacgcccgccgagaccacagttaggctacgagcgtaatgaacaccccggggcttcccgtgtgccaggaccaccttgaattttgggagggcgtctttacgggccttacccatatagatgcccacttcctatcccagacaaagcagagtggggagaaccttccttacctggtagcgtacaagccaccgtgtgcgctagggctcaagcccctcccccgtcgtgggaccagatgtggaagtgtttagtccgcctcaagcccaccctccatgggccaacacccctgctatacagattgggcgctgttcaaatgaagtcaccctgacacacccaatcacaaaatacatcatgacatgtatgtcggctga

SEQ ID NO: 359 - DNA, 4869 bp, Hepatitis C virus; identical to SEQ ID NO: 194

SEQ ID NO: 360 - DNA, 4869 bp, Hepatitis C virus; identical to SEQ ID NO: 194

SEQ ID NO: 361 - DNA, 4869 bp, Hepatitis C virus
tcgcccacaggacgtcaagttcccgggtggcggtcagatcgttggtggagtttacttgttgccgcgcaggggccctagattgggtgtgcgcgcgacgaggaagacttccgagcggtcgcaacctcgagtagacgtcagcctatccccaaggcacgtcggcccgagggcaggacctgggctcagcccgggtacccctggcccctctatggcaatgagggctgcgggtgggcgggatggctcctgtctccccgtggtctcggcctaactggggccccacagacccccggcgtaggtcgcgtaatttgggtaaggtcatcgatacccttacatgcggcttcgccgacctcatggggtacataccgctcgtcggcgcccctcttgggggcgctgccaggccctggcgcatggcgtccgggttctggaagacggcgtgaactatgcaacagggaaccttcctggttgctctttctctatcttccttctggctttgctctcttgcctgactgtgcctgcttcagcctacaagtgcgcaactccacggggctttatcatgtcaccaatgattgccctaactcgagtattgtgtacgaggcggacgatgctatcctgcacactccggggtgtgtcccttgcgtccgcgagggtaacggctcgaggtgttggtggcgataacccccacggtggccaccagggacggcaaactccccacagtgcagcttcgacgtcacatcgatctgctcgtcgggagcgctaccctttgttcggccctttacgtgggggacctgtgcggtctgtctttcttgtcggccaactgttcaccttctctcccaggcgccactggacaacgcaggactgcaattgttccatctatcccggccatataacgggtcaccgtatggcatgggacatgatgatgaactggtcccctacgcggcgctggtagtagctcagatgctccggatcccacaagccatcctggacatgatcgctggtgctcactggggagtcctggcgggcatagcgtatttctccatggtggggaactgggcgaaggtcctgtagtgctgctgctatttgccggcgtcgacgcgggaacccacgtcaccgggggcattgccgcccgtaccacgtctagaattgctggtctcttcaacccaggcgcccagcaggacatccagctggttaacaccaacggcagtggcacatcaacagaacggccttgaactgtaacgatagccttcacaccggctggatagcggggcttttctatcgctacaaattcaactcttcaggctgtcccgagaggttggccagctgccgacccctaccgattttgcccagggctggggccctattagttacgccaacggaagcggccccgaccaacgcccctactgctggcactatcccccaaagccttgcggcattgtgcccgcacagagcgtgtgtggcccggtgtattgcttcctcccagccccgtggtggtgggaacgaccgacaaggcgggcgcgcctacctacagatggggtgcaaacgatacggacgtcttcgtccttaacaacaccaggccaccactgggcaattggttcggttgacctggatgaactcaactggatacaccaaagtgtgcggggcgcccccttgcgtcatcggaggggtgggcaacaagaccttgcactgccccaccgattgtttccgcaagcatccggaagccacatactctcggtgcggctccgtccctggattacacccaggtgtctggtcgactatccgtataggctttggcattacccttgtaccatcaactacaccgtgttcaaagtcaggatgtacgtgggaggggtcgagcataggctggaggcgcctgcaactggacgcggggcgaacgttgcaatctggaagacagggacaggtccgagctcagcccgttgctgctgtccaccacacagtggcaagtccttccgtgttccttcacgaccctgccagccttgtccaccggcctctccacctccaccagaacattgtggacgtgcagtacttatacggggtggggtcaagcatcgcgtcctgggccatcaagtgggagtacgtcgttctcctattccttctgctcgcagacgcgcgcgtctgtcctgcttgtggatgatgttactcatatcccaagcggaggcggctttggagaacctcgtagtgctcaatgcagcatctttggccgggacacacggtcttgtgtccctcctcgtgttcttctgctttgcgtggtacctgaaggtaggtgggtgcccggagcggtctacgccctctacgggatgtggcctctcctcctgctcctattggcgttgccccagcgggcatatgcgttggacacggaggtggccgcgtcgtgtggcggcgctgtcttgtcgggttgatggcgctgactctgtcaccatattacaagcgctatgtcagctggtgcttatggtggcttcagtactttctgaccagagcagaagcgcaactgcacgtgtgggttccccctctcgacgtccgagggggggcgacgccgtcatcttactcatgtgtgctgtacgcccggctttggtgtttgacatcaccaagctgctgctggccgtccttggacccctctggattctccaagccagtttgcttaaagtgccctacttgtgcgcgttcaaggccttctccggatctgcgcgctagcgcggaagatggcggggggtcattacgtgcaaatggtcatcatcaagttgggggcgctcactggcacttatgtgtataaccatctcactcctcttcgggactggcgcacaacggcctgcgagatctggctgtggctgtagagccagtcgtcttctcccgaatggagaccaacctcatcacgtggggggcagacaccgccgcatgcggcgacatcatcaacggcttgcccgttccgcccgcaggggccgggagatactgctcggaccagccgacggaatggtctccaaggggtggaggttgctggcacccatcacggcatacgcccagcagacaaggggcctcctagggtgtataatcaccagcctaaccggcgggacaaaaatcaggtggagggtgaggtccagattgtgtcaactgctgcccaaacctttctggcaacgtgcatcaatggagtatgctggaccgtctaccacggggccggaacgaggaccatcgcatccccaagggtcctgttatccagatgtacaccaatgtagataaagatctcgtgggttggcccgctcctcaaggttcccgttctttggcaccctgcacctgcggctcctcggacctttatctggtcacgaggcacgccgatgtcttcccgtgcgccggcggggtgatagcaggggcagcctgctttcgccccggcccatttcctacttgaaaggctcctcggggggtccgctgttgtgccccgcggggcacgccgtgggcattttcagggcgcggtgtgcacccgtggagtggctaaggcagtggactttatccctgtagagaacctagagacaaccatgaggcccccggtgttcacggacaactcctctccaccagcagtaccccagagcttccaggtggcccacctgcatctcccacaggcagcggcaagagcaccaaggtcccagctgcatacgcagctcagggctataaggtgctagtgctcaacccctctgttgctgcaacactaggcttcggtgcttatatgtccaaggcccagggatcgaccctaacatcaggaccggggtgagaacaattaccactggcagccccatcacgtactccacctacggcaagttccttgccgacggcgggtgctcagggggtgcttatgacataataatctgtgacgagtgccacccacggatgccacgtccatcttaggcatcggcaccgtccttgaccaagcagagaccgcaggggcgaggcttgttgtgctcgccaccgctacccctccgggctccatcactgtgccccatcctaacatgaggaggttgctctgtccaccaccggagagatccccttttatggcaaggctatccccctcgaagtaatcaagggggggaggcatctcatcttctgtcattcaaagaagaagtgtgacgagctcgctgcaaagctggttgcatgggcgtcaatgccgtggcctattaccgcggtcttgacgtgtctgtcatcccgaccagcggcgatgttgtcgtcgtggcaactgatgctctcatgaccggctataccggcgacttcgactcggtgatgactgcaacacgtgtgtcacccagacagtcgatttcagccttgaccccaccttcaccattgagacaaccacgcttccccaggatgctgtctcccgtacacaacggcggggcaggactggcagggggaagccaggcacctacggtttgtggcaccgggggagcgcccctctggcatgttcgactcgtctgtcctctgtgagtgctatgacgcgggctgtgcttggtatgagctcacgcccgccgagaccacagttaggctacgagcgtaatgaacaccccggggcttcccgtgtgccaggaccaccttgaattttgggagggcgtctttacgggccttacccatatagatgcccacttcctatcccagacaaagcagagtggggagaaccttccttacctggtagcgtacaagccaccgtgtgcgctagggctcaagcccctcccccgtcgtgggaccagatgtggaagtgtttagtccgcctcaagcccgccctccatgggccaacacccctgctatacagattgggcgctgttcaaatgaagtcaccctgacacacccaatcacaaaatacatcatgacatgtatgtcggctga

SEQ ID NO: 362 - DNA, 4869 bp, Hepatitis C virus
tcgcccacaggacgtcaagttcccgggtggcggtcagatcgttggtggagtttacttgttgccgcgcaggggccctagattgggtgtgcgcgcgacgaggaagacttccgagcggtcgcaacctcgagtagacgtcagcctatccccaaggcacgtcggcccgagggcaggacctgggctcagcccgggtacccctggcccctctatggcaatgagggctgcgggtgggcgggatggctcctgtctccccgtggtctcggcctaactggggccccacagacccccggcgtaggtcgcgtaatttgggtaaggtcatcgatacccttacatgcggcttcgccgacctcatggggtacataccgctcgtcggcgcccctcttgggggcgctgccaggccctggcgcatggcgtccgggttctggaagacggcgtgaactatgcaacagggaaccttcctggttgctctttctctatcttccttctggctttgctctcttgcctgactgtgcctgcttcagcctacaagtgcgcaactccacggggctttatcatgtcaccaatgattgccctaactcgagtattgtgtacgaggcggacgatgctatcctgcacactccggggtgtgtcccttgcgtccgcgagggtaacggctcgaggtgttggtggcgataacccccacggtggccaccagggacggcaaactccccacagtgcagcttcgacgtcacatcgatctgctcgtcgggagcgctaccctttgttcggccctttacgtgggggacctgtgcggtctgtctttcttgtcggccaactgttcaccttctctcccaggcgccactggacaacgcaggactgcaattgttccatctatcccggccatataacgggtcaccgtatggcatgggacatgatgatgaactggtcccctacgcggcgctggtagtagctcagatgctccggatcccacaagccatcctggacatgatcgctggtgctcactggggagtcctggcgggcatagcgtatttctccatggtggggaactgggcgaaggtcctgtagtgctgctgctatttgccggcgtcgacgcgggaacccacgtcaccgggggcattgccgcccgtaccacgtctagaattgctggtctcttcaacccaggcgcccagcaggacatccagctggttaacaccaacggcagtggcacatcaacagaacggccttgaactgtaacgatagccttcacaccggctggatagcggggcttttctatcgctacaaattcaactcttcaggctgtcccgagaggttggccagctgccgacccctaccgattttgcccagggctggggccctattagttacgccaacggaagcggccccgaccaacgcccctactgctggcactatcccccaaagccttgcggcattgtgcccgcacagagcgtgtgtggcccggtgtattgcttcctcccagccccgtggtggtgggaacgaccgacaaggcgggcgcgcctacctacagatggggtgcaaacgatacggacgtcttcgtccttaacaacaccaggccaccactgggcaattggttcggttgacctggatgaactcaactggatacaccaaagtgtgcggggcgcccccctgcgtcatcggaggggtgggcaacaagaccttgcactgccccaccgattgtttccgcaagcatccggaagccacatactctcggtgcggctccgtccctggattacacccaggtgtctggtcgactatccgtataggctttggcattacccttgtaccatcaactacaccgtgttcaaagtcaggatgtacgtgggaggggtcgagcataggctggaggcgcctgcaactggacgcggggcgaacgttgcaatctggaagacagggacaggtccgagctcagcccgttgctgctgtccaccacacagtggcaagtccttccgtgttccttcacgaccctgccagccttgtccaccggcctctccacctccaccagaacattgtggacgtgcagtacttatacggggtggggtcaagcatcgcgtcctgggccatcaagtgggagtacgtcgttctcctattccttctgctcgcagacgcgcgcgtctgtcctgcttgtggatgatgttactcatatcccaagcggaggcggctttggagaacctcgtagtgctcaatgcagcatctttggccgggacacacggtcttgtgtccctcctcgtgttcttctgctttgcgtggtacctgaaggtaggtgggtgcccggagcggtctacgccctctacgggatgtggcctctcctcctgctcctattggcgttgccccagcgggcatatgcgttggacacggaggtggccgcgtcgtgtggcggcgctgtcttgtcgggttgatggcgctgactctgtcaccatattacaagcgctatgtcagctggtgcttatggtggcttcagtactttctgaccagagcagaagcgcaactgcacgtgtgggttccccctctcgacgtccgagggggggcgacgccgtcatcttactcatgtgtgctgtacgcccggctttggtgtttgacatcaccaagctgctgctggccgtcctcggacccctctggattctccaagccagtttgcttaaagtgccctacttgtgcgcgttcaaggccttctccggatctgcgcgctagcgcggaagatggcggggggtcattacgtgcaaatggtcatcatcaagttgggggcgctcactggcacttatgtgtataaccatctcactcctcttcgggactggcgcacaacggcctgcgagatctggctgtggctgtagagccagtcgtcttctcccgaatggagaccaacctcatcacgtggggggcagacaccgccgcatgcggcgacatcatcaacggcttgcccgttccgcccgcaggggccgggagatactgctcggaccagccgacggaatggtctccaaggggtggaggttgctggcacccatcacggcatacgcccagcagacaaggggcctcctagggtgtataatcaccagcctaaccggcgggacaaaaatcaggtggagggtgaggtccagattgtgtcaactgctgcccaaacctttctggcaacgtgcatcaatggagtatgctggaccgtctaccacggggccggaacgaggaccatcgcatccccaagggtcctgttatccagatgtacaccaatgtagataaagatctcgtgggttggcccgctcctcaaggttcccgttctttggcaccctgcacctgcggctcctcggacctttatctggtcacgaggcacgccgatgtcttcccgtgcgccggcggggtgatagcaggggcagcctgctttcgccccggcccatttcctacttgaaaggctcctcggggggtccgctgttgtgccccgcggggcacgccgtgggcattttcagggcgcggtgtgcacccgtggagtggctaaggcagtggactttatccctgtagagaacctagagacaaccatgaggtccccggtgttcacggacaactcctctccaccagcagtaccccagagcttccaggtggcccacctgcatctcccacaggcagcggcaagagcaccaaggtcccagctgcatacgcagctcagggctataaggtgctagtgctcaacccctctgttgctgcaacactaggcttcggtgcttatgtgtccaaggcccagggatcgaccctaacatcaggaccggggtgagaacaattaccactggcagccccatcacgtactccacctacggcaagttccttgccgacggcgggtgctcagggggtgcttatgacatgataatctgtgacgagtgccacccacggatgccacgtccatcttaggcatcggcaccgtccttgaccaagcagagaccgcaggggcgaggcttgttgtgctcgccaccgctacccctccgggctccatcactgtgccccatcctaacatgaggaggttgctctgtccaccaccggagagatccccttttatggcaaggctatccccctcgaagtaatcaagggggggaggcatctcatcttctgtcattcaaagaagaagtgtgacgagctcgctgcaaagctggttgcatgggcgtcaatgccgtggcctattaccgcggtcttgacgtgtctgtcatcccgaccagcggcgatgttgtcgtcgtggcaactgatgctctcatgaccggctataccggcgacttcgactcggtgatgactgcaacacgtgtgtcacccagacagtcgatttcagccttgaccccaccttcaccattgagacaaccacgcttccccaggatgctgtctcccgtacacaacggcggggcaggactggcagggggaagccaggcacctacggtttgtggcaccgggggagcgcccctctggcatgttcgactcgtctgtcctctgtgagtgctatgacgcgggctgtgcttggtatgagctcacgcccgccgagaccacagttaggctacgagcgtaatgaacaccccggggcttcccgtgtgccaggaccaccttgaattttgggagggcgtctttacgggccttacccatatagatgcccacttcctatcccagacaaagcagagtggggagaaccttccttacctggtagcgtacaagccaccgtgtgcgctagggctcaagcccctcccccgtcgtgggaccagatgtggaagtgtttagtccgcctcaagcccaccctccatgggccaacacccctgctatacagattgggcgctgttcaaatgaagtcaccctgacacacccaatcacaaaatacatcatgacatgtatgtcggctga

SEQ ID NO: 363 - DNA, 4869 bp, Hepatitis C virus
tcgcccacaggacgtcaagttcccgggtggcggtcagatcgttggtggagtttacttgttgccgcgcaggggccctagattgggtgtgcgcgcgacgaggaagacttccgagcggtcgcaacctcgagtagacgtcagcctatccccaaggcacgtcggcccgagggcaggacctgggctcagcccgggtacccctggcccctctatggcaatgagggctgcgggtgggcgggatggctcctgtctccccgtggtctcggcctaactggggccccacagacccccggcgtaggtcgcgtaatttgggtaaggtcatcgatacccttacatgcggcttcgccgacctcatggggtacataccgctcgtcggcgcccctcttgggggcgctgccaggccctggcgcatggcgtccgggttctggaagacggcgtgaactatgcaacagggaaccttcctggttgctctttctctatcttccttctggctttgctctcttgcctgactgtgcctgcttcagcctacaagtgcgcaactccacggggctttatcatgtcaccaatgattgccctaactcgagtattgtgtacgaggcggacgatgctatcctgcacactccggggtgtgtcccttgcgtccgcgagggtaacggctcgaggtgttggtggcgataacccccacggtggccaccagggacggcaaactccccacagtgcagcttcgacgtcacatcgatctgctcgtcgggagcgctaccctttgttcggccctttacgtgggggacctgtgcggtctgtctttcttgtcggccaactgttcaccttctctcccaggcgccactggacaacgcaggactgcaattgttccatctatcccggccatataacgggtcaccgtatggcatgggacatgatgatgaactggtcccctacgcggcgctggtagtagctcagatgctccggatcccacaagccatcctggacatgatcgctggtgctcactggggagtcctggcgggcatagcgtatttctccatggtggggaaccgggcgaaggtcctgtagtgctgctgctatttgccggcgtcgacgcgggaacccacgtcaccgggggcattgccgcccgtaccacgtctagaattgctggtctcttcaacccaggcgcccagcaggacatccagctggttaacaccaacggcagtggcacatcaacagaacggccttgaactgtaacgatagccttcacaccggctggatagcggggcttttctatcgctacaaattcaactcttcaggctgtcccgagaggttggccagctgccgacccctaccgattttgcccagggctggggccctattagttacgccaacggaagcggccccgaccaacgcccctactgctggcactatcccccaaagccttgcggcattgtgcccgcacagagcgtgtgtggcccggtgtattgcttcctcccagccccgtggtggtgggaacgaccgacaaggcgggcgcgcctacctacagatggggtgcaaacgatacggacgtcttcgtccttaacaacaccaggccaccactgggcaattggttcggttgacctggatgaactcaactggatacaccaaagtgtgcggggcgcccccctgcgtcatcggaggggtgggcaacaagaccttgcactgccccaccgattgtttccgcaagcatccggaagccacatactctcggtgcggctccgtccctggattacacccaggtgtctggtcgactatccgtataggctttggcattacccttgtaccatcaactacaccgtgttcaaagtcaggatgtacgtgggaggggtcgagcataggctggaggcgcctgcaactggacgcggggcgaacgttgcaatctggaagacagggacaggtccgagctcagcccgttgctgctgtccaccacacagtggcaagtccttccgtgttccttcacgaccctgccagccttgtccaccggcctctccacctccaccagaacattgtggacgtgcagtacttatacggggtggggtcaagcatcgcgtcctgggccatcaagtgggagtacgtcgttctcctattccttctgctcgcagacgcgcgcgtctgtcctgcttgtggatgatgttactcatatcccaagcggaggcggctttggagaacctcgtagtgctcaatgcagcatctttggccgggacacacggtcttgtgtccctcctcgtgttcttctgctttgcgtggtacctgaaggtaggtgggtgcccggagcggtctacgccctctacgggatgtggcctctcctcctgctcctattggcgttgccccagcgggcatatgcgttggacacggaggtggccgcgtcgtgtggcggcgctgtcttgtcgggttgatggcgctgactctgtcaccatattacaagcgctatgtcagctggtgcttatggtggcttcagtactttctgaccagagcagaagcgcaactgcacgtgtgggttccccctctcgacgtccgagggggggcgacgccgtcatcttactcatgtgtgctgtacgcccggctttggtgtttgacatcaccaagctgctgctggccgtcctcggacccctctggattctccaagccagtttgcttaaagtgccctacttgtgcgcgttcaaggccttctccggatctgcgcgctagcgcggaagatggcggggggtcattacgtgcaaatggtcatcatcaagttgggggcgctcactggcacttatgtgtataaccatctcactcctcttcgggactggcgcacaacggcctgcgagatctggctgtggctgtagagccagtcgtcttctcccgaatggagaccaacctcatcacgtggggggcagacaccgccgcatgcggcgacatcatcaacggcttgcccgttccgcccgcaggggccgggagatactgctcggaccagccgacggaatggtctccaaggggtggaggttgctggcacccatcacggcatacgcccagcagacaaggggcctcctagggtgtataatcaccagcctaaccggcgggacaaaaatcaggtggagggtgaggtccagattgtgtcaactgctgcccaaacctttctggcaacgtgcatcaatggagtatgctggaccgtctaccacggggccggaacgaggaccatcgcatccccaagggtcctgttatccagatgtacaccaatgtagataaagatctcgtgggttggcccgctcctcaaggttcccgttctttggcaccctgcacctgcggctcctcggacctttatctggtcacgaggcacgccgatgtcttcccgtgcgccggcggggtgatagcaggggcagcctgctttcgccccggcccatttcctacttgaaaggctcctcggggggtccgctgttgtgccccgcggggcacgccgtgggcattttcagggcgcggtgtgcacccgtggagtggctaaggcagtggactttatccctgtagagaacctagagacaaccatgaggtccccggtgttcacggacaactcctctccaccagcagtaccccagagcttccaggtggcccacctgcatctcccacaggcagcggcaagagcaccaaggtcccagctgcatacgcagctcagggctataaggtgctagtgctcaacccctctgttgctgcaacactaggcttcggtgcttatatgtccaaggcccagggatcgaccctaacatcaggaccggggtgagaacaattaccactggcagccccatcacgtactccacctacggcaagttccttgccgacggcgggtgctcagggggtgcttatgacataataatctgtgacgagtgccacccacggatgccacgtccatcttaggcatcggcaccgtccttgaccaagcagagaccgcaggggcgaggcttgttgtgctcgccaccgctacccctccgggctccatcactgtgccccatcctaacatgaggaggttgctctgtccaccaccggagagatccccttttatggcaaggctatccccctcgaagtaatcaagggggggaggcatctcatcttctgtcattcaaagaagaagtgtgacgagctcgctgcaaagctggttgcatgggcgtcaatgccgtggcctattaccgcggtcttgacgtgtctgtcatcccgaccagcggcgatgttgtcgtcgtggcaactgatgctctcatgaccggctataccggcgacttcgactcggtgatgactgcaacacgtgtgtcacccagacagtcgatttcagccttgaccccaccttcaccattgagacaaccacgcttccccaggatgctgtctcccgtacacaacggcggggcaggactggcagggggaagccaggcacctacggtttgtggcaccgggggagcgcccctctggcatgttcgactcgtctgtcctctgtgagtgctatgacgcgggctgtgcttggtatgagctcacgcccgccgagaccacagttaggctacgagcgtaatgaacaccccggggcttcccgtgtgccaggaccaccttgaattttgggagggcgtctttacgggccttacccatatagatgcccacttcctatcccagacaaagcagagtggggagaaccttccttacctggtagcgtacaagccaccgtgtgcgctagggctcaagcccctcccccgtcgtgggaccagatgtggaagtgtttagtccgcctcaagcccgccctccatgggccaacacccctgctatacagattgggcgctgttcaaatgaagtcaccctgacacacccaatcacaaaatacatcatgacatgtatgtcggctga

SEQ ID NO: 364 - DNA, 4869 bp, Hepatitis C virus
tcgcccacaggacgtcaagttcccgggtggcggtcagatcgttggtggagtttacttgttgccgcgcaggggccctagattgggtgtgcgcgcgacgaggaagacttccgagcggtcgcaacctcgagtagacgtcagcctatccccaaggcacgtcggcccgagggcaggacctgggctcagcccgggtacccctggcccctctatggcaatgagggctgcgggtgggcgggatggctcctgtctccccgtggtctcggcctaactggggccccacagacccccggcgtaggtcgcgtaatttgggtaaggtcatcgatacccttacatgcggcttcgccgacctcatggggtacataccgctcgtcggcgcccctcttgggggcgctgccaggccctggcgcatggcgtccgggttctggaagacggcgtgaactatgcaacagggaaccttcctggttgctctttctctatcttccttctggctttgctctcttgcctgactgtgcctgcttcagcctacaagtgcgcaactccacggggctttatcatgtcaccaatgattgccctaactcgagtattgtgtacgaggcggacgatgctatcctgcacactccggggtgtgtcccttgcgtccgcgagggtaacggctcgaggtgttggtggcgataacccccacggtggccaccagggacggcaaactccccacagtgcagcttcgacgtcacatcgatctgctcgtcgggagcgctaccctttgttcggccctttacgtgggggacctgtgcggtctgtctttcttgtcggccaactgttcaccttctctcccaggcgccactggacaacgcaggactgcaattgttccatctatcccggccatataacgggtcaccgtatggcatgggacatgatgatgaactggtcccctacgcggcgctggtagtagctcagatgctccggatcccacaagccatcctggacatgatcgctggtgctcactggggagtcctggcgggcatagcgtatttctccatggtggggaactgggcgaaggtcctgtagtgctgctgctatttgccggcgtcgacgcgggaacccacgtcaccgggggcattgccgcccgtaccacgtctagaattgctggtctcttcaacccaggcgcccagcaggacatccagctggttaacaccaacggcagtggcacatcaacagaacggccttgaactgtaacgatagccttcacaccggctggatagcggggcttttctatcgctacaaattcaactcttcaggctgtcccgagaggttggccagctgccgacccctaccgattttgcccagggctggggccctattagttacgccaacggaagcggccccgaccaacgcccctactgctggcactatcccccaaagccttgcggcattgtgcccgcacagagcgtgtgtggcccggtgtattgcttcctcccagccccgtggtggtgggaacgaccgacaaggcgggcgcgcctacctacagatggggtgcaaacgatacggacgtcttcgtccttaacaacaccaggccaccactgggcaattggttcggttgacctggatgaactcaactggatacaccaaagtgtgcggggcgcccccctgcgtcatcggaggggtgggcaacaagaccttgcactgccccaccgattgtttccgcaagcatccggaagccacatactctcggtgcggctccgtccctggattacacccaggtgtctggtcgactatccgtataggctttggcattacccttgtaccatcaactacaccgtgttcaaagtcaggatgtacgtgggaggggtcgagcataggctggaggcgcctgcaactggacgcggggcgaacgttgcaatctggaagacagggacaggtccgagctcagcccgttgctgctgtccaccacacagtggcaagtccttccgtgttccttcacgaccctgccagccttgtccaccggcctctccacctccaccagaacattgtggacgtgcagtacttatacggggtggggtcaagcatcgcgtcctgggccatcaagtgggagtacgtcgttctcctattccttctgctcgcagacgcgcgcatctgtcctgcttgtggatgatgttactcatatcccaagcggaggcggctttggagaacctcgtagtgctcaatgcagcatctttggccgggacacacggtcttgtgtccctcctcgtgttcttctgctttgcgtggtacctgaaggtaggtgggtgcccggagcggtctacgccctctacgggatgtggcctctcctcctgctcctattggcgttgccccagcgggcatatgcgttggacacggaggtggccgcgtcgtgtggcggcgctgtcttgtcgggttgatggcgctgactctgtcaccatattacaagcgctatgtcagctggtgcttatggtggcttcagtactttctgaccagagcagaagcgcaactgcacgtgtgggttccccctctcgacgtccgagggggggcgacgccgtcatcttactcatgtgtgctgtacgcccggctttggtgtttgacatcaccaagctgctgctggccgtcctcggacccctctggattctccaagccagtttgcttaaagtgccctacttgtgcgcgttcaaggccttctccggatctgcgcgctagcgcggaagatggcggggggtcattacgtgcaaatggtcatcatcaagttgggggcgctcactggcacttatgtgtataaccatctcactcctcttcgggactggcgcacaacggcctgcgagatctggctgtggctgtagagccagtcgtcttctcccgaatggagaccaacctcatcacgtggggggcagacaccgccgcatgcggcgacatcatcaacggcttgcccgttccgcccgcaggggccgggagatactgctcggaccagccgacggaatggtctccaaggggtggaggttgctggcacccatcacggcatacgcccagcagacaaggggcctcctagggtgtataatcaccagcctaaccggcgggacaaaaatcaggtggagggtgaggtccagattgtgtcaactgctgcccaaacctttctggcaacgtgcatcaatggagtatgctggaccgtctaccacggggccggaacgaggaccatcgcatccccaagggtcctgttatccagatgtacaccaatgtagataaagatctcgtgggttggcccgctcctcaaggttcccgttctttggcaccctgcacctgcggctcctcggacctttatctggtcacgaggcacgccgatgtcttcccgtgcgccggcggggtgatagcaggggcagcctgctttcgccccggcccatttcctacttgaaaggctcctcggggggtccgctgttgtgccccgcggggcacgccgtgggcattttcagggcgcggtgtgcacccgtggagtggctaaggcagtggactttatccctgtagagaacctagagacaaccatgaggtccccggtgttcacggacaactcctctccaccagcagtaccccagagcttccaggtggcccacctgcatctcccacaggcagcggcaagagcaccaaggtcccagctgcatacgcagctcagggctataaggtgctagtgctcaacccctctgttgctgcaacactaggcttcggtgcttatatgtccaaggcccagggatcgaccctaacatcaggaccggggtgagaacaattaccactggcagccccatcacgtactccacctacggcaagttccttgccgacggcgggtgctcagggggtgcttatgacataataatctgtgacgagtgccacccacggatgccacgtccatcttaggcatcggcaccgtccttgaccaagcagagaccgcaggggcgaggcttgttgtgctcgccaccgctacccctccgggctccatcactgtgccccatcctaacatgaggaggttgctctgtccaccaccggagagatccccttttatggcaaggctatccccctcgaagtaatcaagggggggaggcatctcatcttctgtcattcaaagaagaagtgtgacgagctcgctgcaaagctggttgcatgggcgtcaatgccgtggcctattaccgcggtcttgacgtgtctgtcatcccgaccagcggcgatgttgtcgtcgtggcaactgatgctctcatgaccggctataccggcgacttcgactcggtgatgactgcaacacgtgtgtcacccagacagtcgatttcagccttgaccccaccttcaccattgagacaaccacgcttccccaggatgctgtctcccgtacacaacggcggggcaggactggcagggggaagccaggcacctacggtttgtggcaccgggggagcgcccctctggcatgttcgactcgtctgtcctctgtgagtgctatgacgcgggctgtgcttggtatgagctcacgcccgccgagaccacagttaggctacgagcgtaatgaacaccccggggcttcccgtgtgccaggaccaccttgaattttgggagggcgtctttacgggccttacccatatagatgcccacttcctatcccagacaaagcagagtggggagaaccttccttacctggtagcgtacaagccaccgtgtgcgctagggctcaagcccctcccccgtcgtgggaccagatgtggaagtgtttagtccgcctcaagcccaccctccatgggccaacacccctgctatacagattgggcgctgttcaaatgaagtcaccctgacacacccaatcacaaaatacatcatgacatgtatgtcggctga

SEQ ID NO: 365 - DNA, 4869 bp, Hepatitis C virus
tcgcccacaggacgtcaagttcccgggtggcggtcagatcgttggtggagtttacttgttgccgcgcaggggccctagattgggtgtgcgcgcgacgaggaagacttccgagcggtcgcaacctcgagcagacgtcagcctatccccaaggcacgtcggcccgagggtaggacctgggctcagcccgggtacccctggcccctctatggcaatgagggctgtgggtgggcgggatggctcctgtctccccgtggtctcggcctagctggggcccctcagacccccggcgtaggtcgcgtaatttgggtaaagtcatcgatacccttacatgcggcttcgccgacctcatggggtacataccgctcgtcggcgcccctcttgggggcgctgccaggccctggcgcatggcgtccgggttctggaagacggcgtgaactatgcaacagggaaccttcctggttgctctttctctatcttcctcctggctttgctctcttgcctgactgtgcctgcttcagcctacaagtgcgcaactccacggggctttatcatgtcaccaatgattgccctaactcgagtattgtgtacgaggcggccgatgctatcctgcacactccggggtgtgtcccttgcgtctacgagggtaacgcctcgaggtgttggtggcgataacccccacggtggccaccagggacggcaaactccccacagtgcagcttcgacgtcacatcgatctgcttgtcgggagcgctaccctttgttcggccctttacgtgggggacctgtgcggtctgtctttcttgtcggccaactgttcaccttctctcccaggctccactggacaacgcaggactgtaattgttccatctaccccggccatataacgggtcaccgtatggcatgggacatgatgatgaactggtcccctacgcggcgctggtagtagctcagatgctccggatcccgcaagccatcttggacatgatcgctggtgctcactggggagtcctagcgggcatagcgtatttctccatggtggggaactgggcgaaggtcctgtagtgctgctgctatttgccggcgtcgacgcggggacccacgtcaccgggggagctgccggccgtaccacggctggatttgctggtctctttacacgaggcgcccagcagagcatccagttggttaacaccaacggcagtggcacatcaacagaacggctttgaactgcaacgatagccttcggaccggctggatagcggggcttctctatcacaacaaattcaactcttcaggctgtcccgagaggttggccagctgccgacccctaccgattttgcccagggctggggccctatcagttacgccaacggaagcggccccgaccaacgcccctactgctggcactaccccccaaagccttgcggcattgtgcccgcacagagcgtatgtggcccggtatattgtttccccctagccccgtggtggtgggaacgaccgacaggtcgggcgcgcctacctacggatggggtgcaaacgatacggacgtcttcgtcctcaacaacaccaggccaccactgggcaattggttcggttgacctggatgaactcaactggatataccaaagtgtgcggggcgcccccctgtttcatcagaggggtgggcaacaacaccttgcactgccccaccgattgcttccgcaagcatccggaagccacatactctcggtgcggctccgtccctggattacacccaggtgcctggtcaactacccgtataggctttggcattacccttgtaccatcaactacaccgtgttcaaggtcaggatgtacgtgggaggggttgagcataggctagaggcgcctgcaactggacgcggggcgaacgttgcagtctggaagacagggacaggtccgagctcagcccgttgctgctgtccaccacacagtggcaggtccttccctgttccttcacgaccctgccagccttgtccactggcctctccacctccaccagaacattgtggacgtgcagtacttatacggggtggggtcaagtatcgcgtcctgggccatcaagtgggagtacgtcgttctcctattccttctgcttgcagacgcgcgcgtctgtcctgcttgtggatgatgttgctcatatcccaagcggaggcggccttggagaacctcgtagtgctcaatgcagcatctttggccgggacgcatgggtttgtgtccttcctcgtgttcttctgctttgcgtggtacctgaaggtaggtgggtgcccggagcagcctacgccctctacgggatgtggcctctcctcctgctcctgttggcgttgccccagcgggcatacgcgttggacacggaggtggccgcgtcgtgtggcggcgctgtcttgtcgggttgatggcgctgactctgtcaccacattacaagcgatatgtcagctggtgcttgtggtggcttcagtactttctgaccagagcagaagcgcaactgcacgtgtgggttccccccctcgacgtccgagggggggcgacgccgtcatcttactcatgtgtgctgtacgcccgactttggtgtttgacatcaccaagctgctgctggccgtcttcgggcccctttggattctccaagccagtttgctcaaagtaccctacttgtgcgcgttcaaggccttctccggatctgcgcgctagcgcggaagatggcggggggtcattacgtgcaaatggtcatcatcaagctaggggcgctcactggcacctatgtttataaccacctcactcctcttcgggactggcgcacaacggcctgcgagatctggctgtggctgtagagccagtcgtcttctcccgaatggagaccaacctcatcacgtggggggcagacaccgccgcgtgcggtgacatcatcaacggcttgcccgttccgcccgtaggggccgggagatactgctcggaccagccgacggaatggtctccaaggggtggaggttgctggcacccatcacggcatatgcccagcagacgaggggcctcctagggtgtataatcaccagcctaaccggcgggacaaaaaccaggtggagggtgaggtccagattgtgtcaactgctgcccaaactttcctggcaacgtgcatcaatggagtatgctggaccgtctaccacggggccgggacgaggaccatcgcatccccaagggtcctgtcatccagatgtacaccaatgtagacaaagatcttgtgggctggcccgctccccaaggttcccgttcattgacaccctgcacctgcggctcctcggacctttatctggtcacgaggcacgccgatgtcttcccgtgcgccggcggggtgatagcaggggcagcctgctttcgccccggcccatttcctacttgaaaggctcctcggggggtccgctgttgtgccccgcggggcatgctgtgggcatattcagggcgcagtgtgcacccgtggagtggctaaggcggtggactttatccctgtagagaacctagagacaaccatgaggtccccggtgttcacggacaactcctctccaccggcagtaccccagagcttccaggtggcccacctgcatctcccacaggcagcggcaagagcaccaaggtcccggctgcatacgcagctcagggctataaggtgctagtgctcaacccctctgttgctgcaacactaggcttcggtgtttatatgtccaaggcccagggatcgatcctaacatcaggaccggggtgagaacaattaccactggcagccccatcacgtactccacctacggcaagttccttgccgacggcgggtgctcagggggtgcttatgacataataatctgtgacgagtgccacccacggatgccacatctatcttaggcatcggcaccgtccttgaccaagcagagaccgcgggggcgaggcttgttgtgctcgccaccgctacccctccgggctccgtcaccgtgccccatcctaacatgaggaggttgctctgtccaccaccggagagatccctttttatggcaaggctatccccctcgaagtaatcaagggggggaggcatctcatcttctgtcattcaaagaagaagtgtgacgagctcgccgcaaagctggttgcatgggcgtcaatgccgtggcctattaccgcggccttgacgtgtctgtcatcccgaccagcggcgatgttgtcgtcgtggcaactgatgctctcatgaccggctataccggcgacttcgactcggtgatgactgcaacacgtgtgtcacccagacagttgatttcagccttgaccccaccttcaccattgagacaaccacgcttccccaggatgctgtctcccgtacacaacgtcggggcaggactggcagagggaagccaggcacctacgatttgtggcaccgggggagcgcccctccggcatgttcgactcgtctgtcctctgtgagtgctatgacgcgggctgtgcttggtatgagctcacgcccgccgagactacagttaggctacgagcgtaatgaacaccccgggacttcccgtgtgccaggaccaccttgaattttgggagggcgtctttacgggccttactcatatagatgcccacttcctatcccagacaaagcagagcggggagaaccttccttacctggtagcgtacaagccaccgtgtgcgctagggctcaagcccctcccccatcgtgggaccagatgtggaagtgcttggtccgcctcaagcccaccctccatggaccaacacccctgctatacagattgggcgctgttcaaatgagatcaccctgacacacccaatcacaaaatacatcatgacatgtatgtcggctga

SEQ ID NO: 366 - DNA, 4869 bp, Hepatitis C virus
tcgcccacaggacgtcaagttcccgggtggcggtcagatcgttggtggagtttacttgttgccgcgcaggggccctagattgggtgtgcgcgcgacgaggaagacttccgagcggtcgcaacctcgagtagacgtcagcctatccccaaggcacgtcggcccgagggcaggacctgggctcagcccgggtacccctggcccctctatggcaatgagggctgcgggtgggcgggatggctcctgtctccccgtggtctcggcctaactggggccccacagacccccggcgtaggtcgcgtaatttgggtaaggtcatcgatacccttacatgcggcttcgccgacctcatggggtacataccgctcgtcggcgcccctcttgggggcgctgccaggccctggcgcatggcgtccgggttctggaagacggcgtgaactatgcaacagggaaccttcctggttgctctttctctatcttccttctggctttgctctcttgcctgactgtgcctgcttcagcctacaagtgcgcaactccacggggctttatcatgtcaccaatgattgccctaactcgagtattgtgtacgaggcggacgatgctatcctgcacactccggggtgtgtcccttgcgtccgcgagggtaacggctcgaggtgttggtggcgataacccccacggtggccaccagggacggcaaactccccacagtgcagcttcgacgtcacatcgatctgctcgtcgggagcgctaccctttgttcggccctttacgtgggggacctgtgcggtctgtctttcttgtcggccaactgttcaccttctctcccaggcgccactggacaacgcaggactgcaattgttccatctatcccggccatataacgggtcaccgtatggcatgggacatgatgatgaactggtcccctacgcggcgctggtagtagctcagatgctccggatcccacaagccatcctggacatgatcgctggtgctcactggggagtcctggcgggcatagcgtatttctccatggtggggaactgggcgaaggtcctgtagtgctgctgctatttgccggcgtcgacgcgggaacccacgtcaccgggggcattgccgcccgtaccacgtctagaattgctggtctcttcaacccaggcgcccagcaggacatccagctggttaacaccaacggcagtggcacatcaacagaacggccttgaactgtaacgatagccttcacaccggctggatagcggggcttttctattgctacaaattcaactcttcaggctgtcccgagaggttggccagctgccgacccctaccgattttgcccagggctggggccctattagttacgccaacggaagcggccccgaccaacgcccctactgctggcactatcccccaaagccttgcggcattgtgcccgcacagagcgtgtgtggcccggtgtattgcttcctcccagccccgtggtggtgggaacgaccgacaaggcgggcgcgcctacctacagatggggtgcaaacgatacggacgtcttcgtccttaacaacaccaggccaccactgggcaattggttcggttgacctggatgaactcaactggatacaccaaagtgtgcggggcgcccccctgcgtcatcggaggggtgggcaacaagaccttgcactgccccaccgattgtttccgcaagcatccggaagccacatactctcggtgcggctccgtccctggattacacccaggtgtctggtcgactatccgtataggctttggcattacccttgtaccatcaactacaccgtgttcaaagtcaggatgtacgtgggaggggtcgagcataggctggaggcgcctgcaactggacgcggggcgaacgttgcaatctggaagacagggacaggtccgagctcagcccgttgctgctgtccaccacacagtggcaagtccttccgtgttccttcacgaccctgccagccttgtccaccggcctctccacctccaccagaacattgtggacgtgcagtacttatacggggtggggtcaagcatcgcgtcctgggccatcaagtgggagtacgtcgttctcctattccttctgctcgcagacgcgcgcgtctgtcctgcttgtggatgatgttactcatatcccaagcggaggcggctttggagaacctcgtagtgctcaatgcagcatctttggccgggacacacggtcttgtgtccctcctcgtgttcttctgctttgcgtggtacctgaaggtaggtgggtgcccggagcggtctacgccctctacgggatgtggcctctcctcctgctcctattggcgttgccccagcgggcatatgcgttggacacggaggtggccgcgtcgtgtggcggcgctgtcttgtcgggttgatggcgctgactctgtcaccatattacaagcgctatgtcagctggtgcttatggtggcttcagtactttctgaccagagcagaagcgcaactgcacgtgtgggttccccctctcgacgtccgagggggggcgacgccgtcatcttactcatgtgtgctgtacgcccggctttggtgtttgacatcaccaagctgctgctggccgtcctcggacccctctggattctccaagccagtttgcttaaagtgccctacttgtgcgcgttcaaggccttctccggatctgcgcgctagcgcggaagatggcggggggtcattacgtgcaaatggtcatcatcaagttgggggcgctcactggcacttatgtgtataaccatctcactcctcttcgggactggcgcacaacggcctgcgagatctggctgtggctgtagagccagtcgtcttctcccgaatggagaccaacctcatcacgtggggggcagacaccgccgcatgcggcgacatcatcaacggcttgcccgttccgcccgcaggggccgggagatactgctcggaccagccgacggaatggtctccaaggggtggaggttgctggcacccatcacggcatacgcccagcagacaaggggcctcctagggtgtataatcaccagcctaaccggcgggacaaaaatcaggtggagggtgaggtccagattgtgtcaactgctgcccaaacctttctggcaacgtgcatcaatggagtatgctggaccgtctaccacggggccggaacgaggaccatcgcatccccaagggtcctgttatccagatgtacaccaatgtagataaagatctcgtgggttggcccgctcctcaaggttcccgttctttggcaccctgcacctgcggctcctcggacctttatctggtcacgaggcacgccgatgtcttcccgtgcgccggcggggtgatagcaggggcagcctgctttcgccccggcccatttcctacttgaaaggctcctcggggggtccgctgttgtgccccgcggggcacgccgtgggcattttcagggcgcggtgtgcacccgtggagtggctaaggcagtggactttatccctgtagagaacctagagacaaccatgaggtccccggtgttcacggacaactcctctccaccagcagtaccccagagcttccaggtggcccacctgcatctcccacaggcagcggcaagagcaccaaggtcccagctgcatacgcagctcagggctataaggtgctagtgctcaacccctctgttgctgcaacactaggcttcggtgcttatatgtccaaggcccagggatcgaccctaacatcaggaccggggtgagaacaattaccactggcagccccatcacgtactccacctacggcaagttccttgccgacggcgggtgctcagggggtgcttatgacataataatctgtgacgagtgccacccacggatgccacgtccatcttaggcatcggcaccgtccttgaccaagcagagaccgcaggggcgaggcttgttgtgctcgccaccgctacccctccgggctccatcactgtgccccatcctaacatgaggaggttgctctgtccaccaccggagagatccccttttatggcaaggctatccccctcgaagtaatcaagggggggaggcatctcatcttctgtcattcaaagaagaagtgtgacgagctcgctgcaaagctggttgcatgggcgtcaatgccgtggcctattaccgcggtcttgacgtgtctgtcatcccgaccagcggcgatgttgtcgtcgtggcaactgatgctctcatgaccggctataccggcgacttcgactcggtgatgactgcaacacgtgtgtcacccagacagtcgatttcagccttgaccccaccttcaccattgagacaaccacgcttccccaggatgctgtctcccgtacacaacggcggggcaggactggcagggggaagccaggcacctacggtttgtggcaccgggggagcgcccctctggcatgttcgactcgtctgtcctctgtgagtgctatgacgcgggctgtgcttggtatgagctcacgcccgccgagaccacagttaggctacgagcgtaatgaacaccccggggcttcccgtgtgccaggaccaccttgaattttgggagggcgtctttacgggccttacccatatagatgcccacttcctatcccagacaaagcagagtggggagaaccttccttacctggtagcgtacaagccaccgtgtgcgctagggctcaagcccctcccccgtcgtgggaccagatgtggaagtgtttagtccgcctcaagcccaccctccatgggccaacacccctgctatacagattgggcgctgttcaaatgaagtcaccctgacacacccaatcacaaaatacatcatgacatgtatgtcggctga

SEQ ID NO: 367 - DNA, 4869 bp, Hepatitis C virus
tcgcccacaggacgtcaagttcccgggtggcggtcagatcgttggtggagtttacttgttgccgcgcaggggccctagattgggtgtgcgcgcgacgaggaagacttccgagcggtcgcaacctcgagtagacgtcagcctatccccaaggcacgtcggcccgagggcaggacctgggctcagcccgggtacccctggcccctctatggcaatgagggctgcgggtgggcgggatggctcctgtctccccgtggtctcggcctaactggggccccacagacccccggcgtaggtcgcgtaatttgggtaaggtcatcgatacccttacatgcggcttcgccgacctcatggggtacataccgctcgtcggcgcccctcttgggggcgctgccaggccctggcgcatggcgtccgggttctggaagacggcgtgaactatgcaacagggaaccttcctggttgctctttctctatcttccttctggctttgctctcttgcctgactgtgcctgcttcagcctacaagtgcgcaactccacggggctttatcatgtcaccaatgattgccctaactcgagtattgtgtacgaggcggacgatgctatcctgcacactccggggtgtgtcccttgcgtccgcgagggtaacggctcgaggtgttggtggcgataacccccacggtggccaccagggacggcaaactccccacagtgcagcttcgacgtcacatcgatctgctcgtcaggagcgctaccctttgttcggccctttacgtgggggacctgtgcggtctgtctttcttgtcggccaactgttcaccttctctcccaggcgccactggacaacgcaggactgcaattgttccatctatcccggccatataacgggtcaccgtatggcatgggacatgatgatgaactggtcccctacgcggcgctggtagtagctcagatgctccggatcccacaagccatcctggacatgatcgctggtgctcactggggagtcctggcgggcatagcgtatttctccatggtggggaactgggcgaaggtcctgtagtgctgctgctatttgccggcgtcgacgcgggaacccacgtcaccgggggcattgccgcccgtaccacgtctagaattgctggtctcttcaacccaggcgcccagcaggacatccagctggttaacaccaacggcagtggcacatcaacagaacggccttgaactgtaacgatagccttcacaccggctggatagcggggcttttctatcgctacaaatccaactcttcaggctgtcccgagaggttggccagctgccgacccctaccgattttgcccagggctggggccctattagttacgccaacggaagcggccccgaccaacgcccctactgctggcactatcccccaaagccttgcggcattgtgcccgcacagagcgtgtgtggcccggtgtattgcttcctcccagccccgtggtggtgggaacgaccgacaaggcgggcgcgcctacctacagatggggtgcaaacgatacggacgtcttcgtccttaacaacaccaggccaccactgggcaattggttcggttgacctggatgaactcaactggatacaccaaagtgtgcggggcgcccccctgcgtcatcggaggggtgggcaacaagaccttgcactgccccaccgattgtttccgcaagcatccggaagccacatactctcggtgcggctccgtccctggattacacccaggtgtctggtcgactatccgtataggctttggcattacccttgtaccatcaactacaccgtgttcaaagtcaggatgtacgtgggaggggtcgagcataggctggaggcgcctgcaactggacgcggggcgaacgttgcaatctggaagacagggacaggtccgagctcagcccgttgctgctgtccaccacacagtggcaagtccttccgtgttccttcacgaccctgccagccttgtccaccggcctctccacctccaccagaacattgtggacgtgcagtacttatacggggtggggtcaagcatcgcgtcctgggccatcaagtgggagtacgtcgttctcctattccttctgctcgcagacgcgcgcgtctgtcctgcttgtggatgatgttactcatatcccaagcggaggcggctttggagaacctcgtagtgctcaatgcagcatctttggccgggacacacggtcttgtgtccctcctcgtgttcttctgctttgcgtggtacctgaaggtaggtgggtgcccggagcggtctacgccctctacgggatgtggcctctcctcctgctcctattggcgttgccccagcgggcatatgcgttggacacggaggtggccgcgtcgtgtggcggcgctgtcttgtcgggttgatggcgctgactctgtcaccatattacaagcgctatgtcagctggtgcttatggtggcttcagtactttctgaccagagcagaagcgcaactgcacgtgtgggttccccctctcgacgtccgagggggggcgacgccgtcatcttactcatgtgtgctgtacgcccggctttggtgtttgacatcaccaagctgctgctggccgtcctcggacccctctggattctccaagccagtttgcttaaagtgccctacttgtgcgcgttcaaggccttctccggatctgcgcgctagcgcggaagatggcggggggtcattacgtgcaaatggtcatcatcaagttgggggcgctcactggcacttatgtgtataaccatctcactcctcttcgggactggcgcacaacggcctgcgagatctggctgtggctgtagagccagtcgtcttctcccgaatggagaccaacctcatcacgtggggggcagacaccgccgcatgcggcgacatcatcaacggcttgcccgttccgcccgcaggggccgggagatactgctcggaccagccgacggaatggtctccaaggggtggaggttgctggcacccatcacggcatacgcccagcagacaaggggcctcctagggtgtataatcaccagcctaaccggcgggacaaaaatcaggtggagggtgaggtccagattgtgtcaactgctgcccaaacctttctggcaacgtgcatcaatggagtatgctggaccgtctaccacggggccggaacgaggaccatcgcatccccaagggtcctgttatccagatgtacaccaatgtagataaagatctcgtgggttggcccgctcctcaaggttcccgttctttggcaccctgcacctgcggctcctcggacctttatctggtcacgaggcacgccgatgtcttcccgtgcgccggcggggtgatagcaggggcagcctgctttcgccccggcccatttcctacttgaaaggctcctcggggggtccgctgttgtgccccgcggggcacgccgtgggcattttcagggcgcggtgtgcacccgtggagtggctaaggcagtggactttatccctgtagagaacctagagacaaccatgaggtccccggtgttcacggacaactcctctccaccagcagtaccccagagcttccaggtggcccacctgcatctcccacaggcagcggcaagagcaccaaggtcccagctgcatacgcagctcagggctataaggtgctagtgctcaacccctctgttgctgcaacactaggcttcggtgcttatatgtccaaggcccagggatcgaccctaacatcaggaccggggtgagaacaattaccactggcagccccatcacgtactccacctacggcaagttccttgccgacggcgggtgctcagggggtgcttatgacataataatctgtgacgagtgccacccacggatgccacgtccatcttaggcatcggcaccgtccttgaccaagcagagaccgcaggggcgaggcttgttgtgctcgccaccgctacccctccgggctccatcactgtgccccatcctaacatgaggaggttgctctgtccaccaccggagagatccccttttatggcaaggctatccccctcgaagtaatcaagggggggaggcatctcatcttctgtcattcaaagaagaagtgtgacgagctcgctgcaaagctggttgcatgggcgtcaatgccgtggcctattaccgcggtcttgacgtgtctgtcatcccgaccagcggcgatgttgtcgtcgtggcaactgatgctctcatgaccggctataccggcgacttcgactcggtgatgactgcaacacgtgtgtcacccagacagtcgatttcagccttgaccccaccttcaccattgagacaaccacgcttccccaggatgctgtctcccgtacacaacggcggggcaggactggcagggggaagccaggcacctacggtttgtggcaccgggggagcgcccctctggcatgttcgactcgtctgtcctctgtgagtgctatgacgcgggctgtgcttggtatgagctcacgcccgccgagaccacagttaggctacgagcgtaatgaacaccccggggcttcccgtgtgccaggaccaccttgaattttgggagggcgtctttacgggccttacccatatagatgcccacttcctatcccagacaaagcagagtggggagaaccttccttacctggtagcgtacaagccaccgtgtgcgctagggctcaagcccctcccccgtcgtgggaccagatgtggaagtgtttagtccgcctcaagcccaccctccatgggccaacacccctgctatacagattgggcgctgttcaaatgaagtcaccctgacacacccaatcacaaaatacatcatgacatgtatgtcggctga

SEQ ID NO: 368 - DNA, 4869 bp, Hepatitis C virus; identical to SEQ ID NO: 195

SEQ ID NO: 369 - DNA, 4869 bp, Hepatitis C virus
tcgcccacaggacgtcaagttcccgggtggcggtcagatcgttggtggagtttacttgttgccgcgcaggggccctagattgggtgtgcgcgcgacgaggaagacttctgagcggtcgcaacctcgagtagacgtcagcctatccccaaggcacgtcggcccgagggcaggacctgggctcagcccgggtacccctggcccctctatggcaatgagggctgcgggtgggcgggatggctcctgtctccccgtggtctcggcctaactggggccccacagacccccggcgtaggtcgcgtaatttgggtaaggtcatcgatacccttacatgcggcttcgccgacctcatggggtacataccgctcgtcggcgcccctcttgggggcgctgccaggccctggcgcatggcgtccgggttctggaagacggcgtgaactatgcaacagggaaccttcctggttgctctttctctatcttccttctggctttgctctcttgcctgactgtgcctgcttcagcctacaagtgcgcaactccacggggctttatcatgtcaccaatgattgccctaactcgagtattgtgtacgaggcggacgatgctatcctgcacactccggggtgtgtcccttgcgtccgcgagggtaacggctcgaggtgttggtggcgataacccccacggtggccaccagggacggcaaactccccacagtgcagcttcgacgtcacatcgatctgctcgtcgggagcgctaccctttgttcggccctttacgtgggggacctgtgcggtctgtctttcttgtcggccaactgttcaccttctctcccaggcgccactggacaacgcaggactgcaattgttccatctatcccggccatataacgggtcaccgtatggcatgggacatgatgatgaactggtcccctacgcggcgctggtagtagctcagatgctccggatcccacaagccatcctggacatgatcgctggtgctcactggggagtcctggcgggcatagcgtatttctccatggtggggaactgggcgaaggtcctgtagtgctgctgctatttgccggcgtcgacgcgggaacccacgtcaccgggggcattgccgcccgtaccacgtctagaattgctggtctcttcaacccaggcgcccagcaggacatccagctggttaacaccaacggcagtggcacatcaacagaacggccttgaactgtaacgatagccttcacaccggctggatagcggggcttttctatcgctacaaattcaactcttcaggctgtcccgagaggttggccagctgccgacccctaccgattttgcccagggctggggccctattagttacgccaacggaagcggccccgaccaacgcccctactgctggcactatcccccaaagccttgcggcattgtgcccgcacagagcgtgtgtggcccggtgtattgcttcctcccagccccgtggtggtgggaacgaccgacaaggcgggcgcgcctacctacagatggggtgcaaacgatacggacgtcttcgtccttaacaacaccaggccaccactgggcaattggttcggttgacctggatgaactcaactggatacaccaaagtgtgcggggcgcccccctgcgtcatcggaggggtgggcaacaagaccttgcactgccccaccgattgtttccgcaagcatccggaagccacatactctcggtgcggctccgtccctggattacacccaggtgtctggtcgactatccgtataggctttggcattacccttgtaccatcaactacaccgtgttcaaagtcaggatgtacgtgggaggggtcgagcataggctggaggcgcctgcaactggacgcggggcgaacgttgcaatctggaagacagggacaggtccgagctcagcccgttgctgctgtccaccacacagtggcaagtccttccgtgttccttcacgaccctgccagccttgtccaccggcctctccacctccaccagaacattgtggacgtgcagtacttatacggggtggggtcaagcatcgcgtcctgggccatcaagtgggagtacgtcgttctcctattccttctgctcgcagacgcgcgcgtctgtcctgcttgtggatgatgttactcatatcccaagcggaggcggctttggagaacctcgtagtgctcaatgcagcatctttggccgggacacacggtcttgtgtccctcctcgtgttcttctgctttgcgtggtacctgaaggtaggtgggtgcccggagcggtctacgccctctacgggatgtggcctctcctcctgctcctattggcgttgccccagcgggcatatgcgttggacacggaggtggccgcgtcgtgtggcggcgctgtcttgtcgggttgatggcgctgactctgtcaccatattacaagcgctatgtcagctggtgcttatggtggcttcagtactttctgaccagagcagaagcgcaactgcacgtgtgggttccccctctcgacgtccgagggggggcgacgccgtcatcttactcatgtgtgctgtacgcccggctttggtgtttgacatcaccaagctgctgctggccgtcctcggacccctctggattctccaagccagtttgcttaaagtgccctacttgtgcgcgttcaaggccttctccggatctgcgcgctagcgcggaagatggcggggggtcattacgtgcaaatggtcatcatcaagttgggggcgctcactggcacttatgtgtataaccatctcactcctcttcgggactggcgcacaacggcctgcgagatctggctgtggctgtagagccagtcgtcttctcccgaatggagaccaacctcatcacgtggggggcagacaccgccgcatgcggcgacatcatcaacggcttgcccgttccgcccgcaggggccgggagatactgctcggaccagccgacggaatggtctccaaggggtggaggttgctggcacccatcacggcatacgcccagcagacaaggggcctcctagggtgtataatcaccagcctaaccggcgggacaaaaatcaggtggagggtgaggtccagattgtgtcaactgctgcccaaacctttctggcaacgtgcatcaatggagtatgctggaccgtctaccacggggccggaacgaggaccatcgcatccccaagggtcctgttatccagatgtacaccaatgtagataaagatctcgtgggttggcccgctcctcaaggttcccgttctttggcaccctgcacctgcggctcctcggacctttatctggtcacgaggcacgccgatgtcttcccgtgcgccggcggggtgatagcaggggcagcctgctttcgccccggcccatttcctacttgaaaggctcctcggggggtccgctgttgtgccccgcggggcacgccgtgggcattttcagggcgcggtgtgcacccgtggagtggctaaggcagtggactttatccctgtagagaacctagagacaaccatgaggtccccggtgttcacggacaactcctctccaccagcagtaccccagagcttccaggtggcccacctgcatctcccacaggcagcggcaagagcaccaaggtcccagctgcatacgcagctcagggctataaggtgctagtgctcaacccctctgttgctgcaacactaggcttcggtgcttatatgtccaaggcccagggatcgaccctaacatcaggaccggggtgagaacaattaccactggcagccccatcacgtactccacctacggcaagttccttgccgacggcgggtgctcagggggtgcttatgacataataatctgtgacgagtgccacccacggatgccacgtccatcttaggcatcggcaccgtccttgaccaagcagagaccgcaggggcgaggcttgttgtgctcgccaccgctacccctccgggctccatcactgtgccccatcctaacatgaggaggttgctctgtccaccaccggagaggtccccttttatggcaaggctatccccctcgaagtaatcaagggggggaggcatctcatcttctgtcattcaaagaagaagtgtgacgagctcgctgcaaagctggttgcatgggcgtcaatgccgtggcctattaccgcggtcttgacgtgtctgtcatcccgaccagcggcgatgttgtcgtcgtggcaactgatgctctcatgaccggctataccggcgacttcgactcggtgatgactgcaacacgtgtgtcacccagacagtcgatttcagccttgaccccaccttcaccattgagacaaccacgcttccccaggatgctgtctcccgtacacaacggcggggcaggactggcagggggaagccaggcacctacggtttgtggcaccgggggagcgcccctctggcatgttcgactcgtctgtcctctgtgagtgctatgacgcgggctgtgcttggtatgagctcacgcccgccgagaccacagttaggctacgagcgtaatgaacaccccggggcttcccgtgtgccaggaccaccttgaattttgggagggcgtctttacgggccttacccatatagatgcccacttcctatcccagacaaagcagagtggggagaaccttccttacctggtagcgtacaagccaccgtgtgcgctagggctcaagcccctcccccgtcgtgggaccagatgtggaagtgtttagtccgcctcaagcccaccctccatgggccaacacccctgctatacagattgggcgctgttcaaatgaagtcaccctgacacacccaatcacaaaatacatcatgacatgtatgtcggctga

SEQ ID NO: 370 - DNA, 4869 bp, Hepatitis C virus
tcgcccacaggacgtcaagttcccgggtggcggtcagatcgttggtggagtttacttgttgccgcgcaggggccctagattgggtgtgcgcgcgacgaggaagacttccgagcggtcgcaacctcgagcagacgtcagcctatccccaaggcacgtcggcccgagggtaggacctgggctcagcccgggtacccctggcccctctatggcaatgagggctgtgggtgggcgggatggctcctgtctccccgtggtctcggcctagctggggcccctcagacccccggcgtaggtcgcgtaatttgggtaaagtcatcgatacccttacatgcggcttcgccgacctcatggggtacataccgctcgtcggcgcccctcttgggggcgctgccaggccctggcgcatggcgtccgggttctggaagacggcgtgaactatgcaacagggaaccttcctggttgctctttctctatcttcctcctggctttgctctcttgcctgactgtgcctgcttcagcctacaagtgcgcaactccacggggctttatcatgtcaccaatgattgccctaactcgagtattgtgtacgaggcggccgatgctatcctgcacactccggggtgtgtcccttgcgtctacgagggtaacgcctcgaggtgttggtggcgataacccccacggtggccaccagggacggcaaactccccacagtgcagcttcgacgtcacatcgatctgcttgtcgggagcgctaccctttgttcggccctttacgtgggggacctgtgcggtctgtctttcttgtcggccaactgttcaccttctctcccaggctccactggacaacgcaggactgtaattgttccatctaccccggccatataacgggtcaccgtatggcatgggacatgatgatgaactggtcccctacgcggcgctggtagtagctcagatgctccggatcccgcaagccatcttggacatgatcgctggtgctcactggggagtcctagcgggcatagcgtatttctccatggtggggaactgggcgaaggtcctgtagtgctgctgctatttgccggcgtcgacgcggggacccacgtcaccgggggagctgccggccgtaccacggctggatttgctggtctctttacacgaggcgcccagcagagcatccagttggttaacaccaacggcagtggcacatcaacagaacggctttgaactgcaacgatagccttcagaccggctggatagcggggcttctctatcacaacaaattcaactcttcaggctgtcccgagaggttggccagctgccgacccctaccgattttgcccagggctggggccctatcagttacgccaacggaagcggccccgaccaacgcccctactgctggcactaccccccaaagccttgcggcattgtgcccgcacagagcgtatgtggcccggtatattgtttccccctagccccgtggtggtgggaacgaccgacaggtcgggcgcgcctacctacggatggggtgcaaacgatacggacgtcttcgtcctcaacaacaccaggccaccactgggcaattggttcggttgacctggatgaactcaactggatataccaaagtgtgcggggcgcccccctgtttcatcagaggggtgggcaacaacaccttgcactgccccaccgattgcttccgcaagcatccggaagccacatactctcggtgcggctccgtccctggattacacccaggtgcctggtcaactacccgtataggctttggcattacccttgtaccatcaactacaccgtgttcaaggtcaggatgtacgtgggaggggttgagcataggctagaggcgcctgcaactggacgcggggcgaacgttgcagtctggaagacagggacaggtccgagctcagcccgttgctgctgtccaccacacagtggcaggtccttccctgttccttcacgaccctgccagccttgtccactggcctctccacctccaccagaacattgtggacgtgcagtacttatacggggtggggtcaagtatcgcgtcctgggccatcaagtgggagtacgtcgttctcctattccttctgcttgcagacgcgcgcgtctgtcctgcttgtggatgatgttgctcatatcccaagcggaggcggccttggagaacctcgtagtgctcaatgcagcatctttggccgggacgcatggggttgtgtccttcctcgtgttcttctgctttgcgtggtacctgaaggtaggtgggtgcccggagcagcctacgccctctacgggatgtggcctctcctcctgctcctgttggcgttgccccagcgggcatacgcgttggacacggaggtggccgcgtcgtgtggcggcgctgtcttgtcgggttgatggcgctgactctgtcaccacattacaagcgatatgtcagctggtgcttgtggtggcttcagtactttctgaccagagcagaagcgcaactgcacgtgtgggttccccccctcgacgtccgagggggggcgacgccgtcatcttactcatgtgtgctgtacgcccgactttggtgtttgacatcaccaagctgctgctggccgtcttcgggcccctttggattctccaagccagtttgctcaaagtaccctacttgtgcgcgttcaaggccttctccggatctgcgcgctagcgcggaagatggcggggggtcattacgtgcaaatggtcatcatcaagctaggggcgctcactggcacctatgtttataaccacctcactcctcttcgggactggcgcacaacggcctgcgagatctggctgtggctgtagagccagtcgtcttctcccgaatggagaccaacctcatcacgtggggggcagacaccgccgcgtgcggtgacatcatcaacggcttgcccgttccgcccgtaggggccgggagatactgctcggaccagccgacggaatggtctccaaggggtggaggttgctggcacccatcacggcatatgcccagcagacgaggggcctcctagggtgtataatcaccagcctaaccggcgggacaaaaaccaggtggagggtgaggtccagattgtgtcaactgctgcccaaactttcctggcaacgtgcatcaatggagtatgctggaccgtctaccacggggccgggacgaggaccatcgcatccccaagggtcctgtcatccagatgtacaccaatgtagacaaagatcttgtgggctggcccgctccccaaggttcccgttcattgacaccctgcacctgcggctcctcggacctttatctggtcacgaggcacgccgatgtcttcccgtgcgccggcggggtgatagcaggggcagcctgctttcgccccggcccatttcctacttgaaaggctcctcggggggtccgctgttgtgccccgcggggcatgctgtgggcatattcagggcgcagtgtgcacccgtggagtggctaaggcggtggactttatccctgtagagaacctagagacaaccatgaggtccccggtgttcacggacaactcctctccaccggcagtaccccagagcttccaggtggcccacctgcatctcccacaggcagcggcaagagcaccaaggtcccggctgcatacgcagctcagggctataaggtgctagtgctcaacccctctgttgctgcaacactaggcttcggtgtttatatgtccaaggcccagggatcgatcctaacatcaggaccggggtgagaacaattaccactggcagccccatcacgtactccacctacggcaagttccttgccgacggcgggtgctcagggggtgcttatgacataataatctgtgacgagtgccacccacggatgccacatctatcttaggcatcggcaccgtccttgaccaagcagagaccgcgggggcgaggcttgttgtgctcgccaccgctacccctccgggctccgtcaccgtgccccatcctaacatgaggaggttgctctgtccaccaccggagagatccctttttatggcaaggctatccccctcgaagtaatcaagggggggaggcatctcatcttctgtcattcaaagaagaagtgtgacgagctcgccgcaaagctggttgcatgggcgtcaatgccgtggcctattaccgcggccttgacgtgtctgtcatcccgaccagcggcgatgttgtcgtcgtggcaactgatgctctcatgaccggctataccggcgacttcgactcggtgatgactgcaacacgtgtgtcacccagacagttgatttcagccttgaccccaccttcaccattgagacaaccacgcttccccaggatgctgtctcccgtacacaacgtcggggcaggactggcagagggaagccaggcacctacgatttgtggcaccgggggagcgcccctccggcatgttcgactcgtctgtcctctgtgagtgctatgacgcgggctgtgcttggtatgagctcacgcccgccgagactacagttaggctacgagcgtaatgaacaccccgggacttcccgtgtgccaggaccaccttgaattttgggagggcgtctttacgggccttactcatatagatgcccacttcctatcccagacaaagcagagcggggagaaccttccttacctggtagcgtacaagccaccgtgtgcgctagggctcaagcccctcccccatcgtgggaccagatgtggaagtgcttggtccgccttaagcccaccctccatggaccaacacccctgctatacagattgggcgctgttcaaatgagatcaccctgacacacccaatcacaaaatacatcatgacatgtatgtcggctga

SEQ ID NO: 371 - DNA, 4869 bp, Hepatitis C virus; identical to SEQ ID NO: 209

SEQ ID NO: 372 - DNA, 4869 bp, Hepatitis C virus
tcgcccacaggacgtcaagttcccgggtggcggtcagatcgttggtggagtttacttgttgccgcgcaggggccctagattgggtgtgcgcgcgacgaggaagacttccgagcggtcgcaacctcgagtagacgtcagcctatccccaaggcacgtcggcccgagggcaggacctgggctcagcccgggtacccctggcccctctatggcaatgagggctgcgggtgggcgggatggctcctgtctccccgtggtctcggcctaactggggccccacagacccccggcgtaggtcgcgtaatttgggtaaggtcgtcgatacccttacatgcggcttcgccgacctcatggggtacataccgctcgtcggcgcccctcttgggggcgctgccaggccctggcgcatggcgtccgggttctggaagacggcgtgaactatgcaacagggaaccttcctggttgctctttctctatcttccttctggctttgctctcttgcctgactgtgcctgcttcagcctacaagtgcgcaactccacggggctttatcatgtcaccaatgattgccctaactcgagtattgtgtacgaggcggacgatgctatcctgcacactccggggtgtgtcccttgcgtccgcgagggtaacggctcgaggtgttggtggcgataacccccacggtggccaccagggacggcaaactccccacagtgcagcttcgacgtcacatcgatctgctcgtcgggagcgctaccctttgttcggccctttacgtgggggacctgtgcggtctgtctttcttgtcggccaactgttcaccttctctcccaggcgccactggacaacgcaggactgcaattgttccatctatcccggccatataacgggtcaccgtatggcatgggacatgatgatgaactggtcccctacgcggcgctggtagtagctcagatgctccggatcccacaagccatcctggacatgatcgctggtgctcactggggagtcctggcgggcatagcgtatttctccatggtggggaactgggcgaaggtcctgtagtgctgctgctatttgccggcgtcgacgcgggaacccacgtcaccgggggcattgccgcccgtaccacgtctagaattgctggtctcttcaacccaggcgcccagcaggacatccagctggttaacaccaacggcagtggcacatcaacagaacggccttgaactgtaacgatagccttcacaccggctggatagcggggcttttctatcgctacaaattcaactcttcaggctgtcccgagaggttggccagctgccgacccctaccgattttgcccagggctggggccctattagttacgccaacggaagcggccccgaccaacgcccctactgctggcactatcccccaaagccttgcggcattgtgcccgcacagagcgtgtgtggcccggtgtattgcttcctcccagccccgtggtggtgggaacgaccgacaaggcgggcgcgcctacctacagatggggtgcaaacgatacggacgtcttcgtccttaacaacaccaggccaccactgggcaattggttcggttgacctggatgaactcaactggatacaccaaagtgtgcggggcgcccccctgcgtcatcggaggggtgggcaacaagaccttgcactgccccaccgattgtttccgcaagcatccggaagccacatactctcggtgcggctccgtccctggattacacccaggtgtctggtcgactatccgtataggctttggcattacccttgtaccatcaactacaccgtgttcaaagtcaggatgtacgtgggaggggtcgagcataggctggaggcgcctgcaactggacgcggggcgaacgttgcaatctggaagacagggacaggtccgagctcagcccgttgctgctgtccaccacacagtggcaagtccttccgtgttccttcacgaccctgccagccttgtccaccggcctctccacctccaccagaacattgtggacgtgcagtacttatacggggtggggtcaagcatcgcgtcctgggccatcaagtgggagtacgtcgttctcctattccttctgctcgcagacgcgcgcgtctgtcctgcttgtggatgatgttactcatatcccaagcggaggcggctttggagaacctcgtagtgctcaatgcagcatctttggccgggacacacggtcttgtgtccctcctcgtgttcttctgctttgcgtggtacctgaaggtaggtgggtgcccggagcggtctacgccctctacgggatgtggcctctcctcctgctcctattggcgttgccccagcgggcatatgcgttggacacggaggtggccgcgtcgtgtggcggcgctgtcttgtcgggttgatggcgctgactctgtcaccatattacaagcgctatgtcagctggtgcttatggtggcttcagtactttctgaccagagcagaagcgcaactgcacgtgtgggttccccctctcgacgtccgagggggggcgacgccgtcatcttactcatgtgtgctgtacgcccggctttggtgtttgacatcaccaagctgctgctggccgtcctcggacccctctggattctccaagccagtttgcttaaagtgccctacttgtgcgcgttcaaggccttctccggatctgcgcgctagcgcggaagatggcggggggtcattacgtgcaaatggtcatcatcaagttgggggcgctcactggcacttatgtgtataaccatctcactcctcttcgggactggcgcacaacggcctgcgagatctggctgtggctgtagagccagtcgtcttctcccgaatggagaccaacctcatcacgtggggggcagacaccgccgcatgcggcgacatcatcaacggcttgcccgttccgcccgcaggggccgggagatactgctcggaccagccgacggaatggtctccaaggggtggaggttgctggcacccatcacggcatacgcccagcagacaaggggcctcctagggtgtataatcaccagcctaaccggcgggacaaaaatcaggtggagggtgaggtccagattgtgtcaactgctgcccaaacctttctggcaacgtgcatcaatggagtatgctggaccgtctaccacggggccggaacgaggaccatcgcatccccaagggtcctgttatccagatgtacaccaatgtagataaagatctcgtgggttggcccgctcctcaaggttcccgttctttggcaccctgcacctgcggctcctcggacctttatctggtcacgaggcacgccgatgtcttcccgtgcgccggcggggtgatagcaggggcagcctgctttcgccccggcccatttcctacttgaaaggctcctcggggggtccgctgttgtgccccgcggggcacgccgtgggcattttcagggcgcggtgtgcacccgtggagtggctaaggcagtggactttatccctgtagagaacctagagacaaccatgaggtccccggtgttcacggacaactcctctccaccagcagtaccccagagcttccaggtggcccacctgcatctcccacaggcagcggcaagagcaccaaggtcccagctgcatacgcagctcagggctataaggtgctagtgctcaacccctctgttgctgcaacactaggcttcggtgcttatatgtccaaggcccagggatcgaccctaacatcaggaccggggtgagaacaattaccactggcagccccatcacgtactccacctacggcaagttccttgccgacggcgggtgctcagggggtgcttatgacataataatctgtgacgagtgccacccacggatgccacgtccatcttaggcatcggcaccgtccttgaccaagcagagaccgcaggggcgaggcttgttgtgctcgccaccgctacccctccgggctccatcactgtgccccatcctaacatgaggaggttgctctgtccaccaccggagagatccccttttatggcaaggctatccccctcgaagtaatcaagggggggaggcatctcatcttctgtcattcaaagaagaagtgtgacgagctcgctgcaaagctggttgcatgggcgtcaatgccgtggcctattaccgcggtcttgacgtgtctgtcatcccgaccagcggcgatgttgtcgtcgtggcaactgatgctctcatgaccggctataccggcgacttcgactcggtgatgactgcaacacgtgtgtcacccagacagtcgatttcagccttgaccccaccttcaccattgagacaaccacgcttccccaggatgctgtctcccgtacacaacggcggggcaggactggcagggggaagccaggcacctacggtttgtggcaccgggggagcgcccctctggcatgttcgactcgtctgtcctctgtgagtgctatgacgcgggctgtgcttggtatgagctcacgcccgccgagaccacagttaggctacgagcgtaatgaacaccccggggcttcccgtgtgccaggaccaccttgaattttgggagggcgtctttacgggccttacccatatagatgcccacttcctatcccagacaaagcagagtggggagaaccttccttacctggtagcgtacaagccaccgtgtgcgctagggctcaagcccctcccccgtcgtgggaccagatgtggaagtgtttagtccgcctcaagcccaccctccatgggccaacacccctgctatacagattgggcgctgttcaaatgaagtcaccctgacacacccaatcacaaaatacatcatgacatgtatgtcggctga

SEQ ID NO: 373 - DNA, 4869 bp, Hepatitis C virus
tcgcccacaggacgtcaagttcccgggtggcggtcagatcgttggtggagtttacttgttgccgcgcaggggccctagattgggtgtgcgcgcgacgaggaagacttccgagcggtcgcaacctcgagcagacgtcagcctatccccaaggcacgtcggcccgagggtaggacctgggctcagcccgggtacccctggcccctctatggcaatgagggctgtgggtgggcgggatggctcctgtctccccgtggtctcggcctagctggggcccctcagacccccggcgtaggtcgcgtaatttgggtaaagtcatcgatacccttacatgcggcttcgccgacctcatggggtacataccgctcgtcggcgcccctcttgggggcgctgccaggccctggcgcatggcgtccgggttctggaagacggcgtgaactatgcaacagggaaccttcctggttgctctttctctatcttcctcctggctttgctctcttgcctgactgtgcctgcttcagcctacaagtgcgcaactccacggggctttatcatgtcaccaatgattgccctaactcgagtattgtgtacgaggcggccgatgctatcctgcacactccggggtgtgtcccttgcgtctacgagggtaacgcctcgaggtgttggtggcgataacccccacggtggccaccagggacggcaaactccccacagtgcagcttcgacgtcacatcgatctgcttgtcgggagcgctaccctttgttcggccctttacgtgggggacctgtgcggtctgtctttcttgtcggccaactgttcaccttctctcccaggctccactggacaacgcaggactgtaattgttccatctaccccggccatataacgggtcaccgtatggcatgggacatgatgatgaactggtcccctacgcggcgctggtagtagctcagatgctccggatcccgcaagccatcttggacatgatcgctggtgctcactggggagtcctagcgggcatagcgtatttctccatggtggggaactgggcgaaggtcctgtagtgctgctgctatttgccggcgtcgacgcggggacccacgtcaccgggggagctgccggccgtaccacggctggatttgctggtctctttacacgaggcgcccagcagagcatccagttggttaacaccaacggcagtggcacatcaacagaacggctttgaactgcaacgatagccttcagaccggctggatagcggggcttctctatcacaacaaattcaactcttcaggctgtcccgagaggttggccagctgccgacccctaccgattttgcccagggctggggccctatcagttacgccaacggaagcggccccgaccaacgcccctactgctggcactaccccccaaagccttgcggcattgtgcccgcacagagcgtatgtggcccggtatattgtttccccctagccccgtggtggtgggaacgaccgacaggtcgggcgcgcctacctacggatggggtgcaaacgatacggacgtcttcgtcctcaacaacaccaggccaccactgggcaattggttcggttgacctggatgaactcaactggatataccaaagtgtgcggggcgcccccctgtttcatcagaggggtgggcaacaacaccttgcactgccccaccgattgcttccgcaagcatccggaagccacatactctcggtgcggctccgtccctggattacacccaggtgcctggtcaactacccgtataggctttggcattacccttgtaccatcaactacaccgtgttcaaggtcaggatgtacgtgggaggggttgagcataggctagaggcgcctgcaactggacgcggggcgaacgttgcagtctggaagacagggacaggtccgagctcagcccgttgctgctgtccaccacacagtggcaggtccttccctgttccttcacgaccctgccagccttgtctactggcctctccacctccaccagaacattgtggacgtgcagtacttatacggggtggggtcaagtatcgcgtcctgggccatcaagtgggagtacgtcgttctcctattccttctgcttgcagacgcgcgcgtctgtcctgcttgtggatgatgttgctcatatcccaagcggaggcggccttggagaacctcgtagtgctcaatgcagcatctttggccgggacgcatgggtttgtgtccttcctcgtgttcttctgctttgcgtggtacctgaaggtaggtgggtgcccggagcagcctacgccctctacgggatgtggcctctcctcctgctcctgttggcgttgccccagcgggcatacgcgttggacacggaggtggccgcgtcgtgtggcggcgctgtcttgtcgggttgatggcgctgactctgtcaccacattacaagcgatatgtcagctggtgcttgtggtggcttcagtactttctgaccagagcagaagcgcaactgcacgtgtgggttccccccctcgacgtccgagggggggcgacgccgtcatcttactcatgtgtgctgtacgcccgactttggtgtttgacatcaccaagctgctgctggccgtcttcgggcccctttggattctccaagccagtttgctcaaagtaccctacttgtgcgcgttcaaggccttctccggatctgcgcgctagcgcggaagatggcggggggtcattacgtgcaaatggtcatcatcaagctaggggcgctcactggcacctatgtttataaccacctcactcctcttcgggactggcgcacaacggcctgcgagatctggctgtggctgtagagccagtcgtcttctcccgaatggagaccaacctcatcacgtggggggcagacaccgccgcgtgcggtgacatcatcaacggcttgcccgttccgcccgtaggggccgggagatactgctcggaccagccgacggaatggtctccaaggggtggaggttgctggcacccatcacggcatatgcccagcagacgaggggcctcctagggtgtataatcaccagcctaaccggcgggacaaaaaccaggtggagggtgaggtccagattgtgtcaactgctgcccaaactttcctggcaacgtgcatcaatggagtatgctggaccgtctaccacggggccgggacgaggaccatcgcatccccaagggtcctgtcatccagatgtacaccaatgtagacaaagatcttgtgggctggcccgctccccaaggttcccgttcattgacaccctgcacctgcggctcctcggacctttatctggtcacgaggcacgccgatgtcttcccgtgcgccggcggggtgatagcaggggcagcctgctttcgccccggcccatttcctacttgaaaggctcctcggggggtccgctgttgtgccccgcggggcatgctgtgggcatattcagggcgcagtgtgcacccgtggagtggctaaggcggtggactttatccctgtagagaacctagagacaaccatgaggtccccggtgttcacggacaactcctctccaccggcagtaccccagagcttccaggtggcccacctgcatctcccacaggcagcggcaagagcaccaaggtcccggctgcatacgcagctcagggctataaggtgctagtgctcaacccctctgttgctgcaacactaggcttcggtgtttatatgtccaaggcccagggatcgatcctaacatcaggaccggggtgagaacaattaccactggcagccccatcacgtactccacctacggcaagttccttgccgacggcgggtgctcagggggtgcttatgacataataatctgtgacgagtgccacccacggatgccacatctatcttaggcatcggcaccgtccttgaccaagcagagaccgcgggggcgaggcttgttgtgctcgccaccgctacccctccgggctccgtcaccgtgccccatcctaacatgaggaggttgctctgtccaccaccggagagatccctttttatggcaaggctatccccctcgaagtaatcaagggggggaggcatctcatcttctgtcattcaaagaagaagtgtgacgagctcgccgcaaagctggttgcatgggcgtcaatgccgtggcctattaccgcggccttgacgtgtctgtcatcccgaccagcggcgatgttgtcgtcgtggcaactgatgctctcatgaccggctataccggcgacttcgactcggtgatgactgcaacacgtgtgtcacccagacagttgatttcagccttgaccccaccttcaccattgagacaaccacgcttccccaggatgctgtctcccgtacacaacgtcggggcaggactggcagagggaagccaggcacctacgatttgtggcaccgggggagcgcccctccggcatgttcgactcgtctgtcctctgtgagtgctatgacgcgggctgtgcttggtatgagctcacgcccgccgagactacagttaggctacgagcgtaatgaacaccccgggacttcccgtgtgccaggaccaccttgaattttgggagggcgtctttacgggccttactcatatagatgcccacttcctatcccagacaaagcagagcggggagaaccttccttacctggtagcgtacaagccaccgtgtgcgctagggctcaagcccctcccccatcgtgggaccagatgtggaagtgcttggtccgcctcaagcccaccctccatggaccaacacccctgctatacagattgggcgctgttcaaatgagatcaccctgacacacccaatcacaaaatacatcatgacatgtatgtcggctga

SEQ ID NO: 374 - DNA, 4869 bp, Hepatitis C virus
tcgcccacaggacgtcaagttcccgggtggcggtcagatcgttggtggagtttacttgttgccgcgcaggggccctagattgggtgtgcgcgcgacgaggaagacttccgagcggtcgcaacctcgagcagacgtcagcctatccccaaggcacgtcggcccgagggtaggacctgggctcagcccgggtacccctggcccctctatggcaatgagggctgtgggtgggcgggatggctcctgtctccccgtggtctcggcctagctggggcccctcagacccccggcgtaggtcgcgtaatttgggtaaagtcatcgatacccttacatgcggcttcgccgacctcatggggtacataccgctcgtcggcgcccctcttgggggcgctgccaggccctggcgcatggcgtccgggttctggaagacggcgtgaactatgcaacagggaaccttcctggttgctctttctctatcttcctcctggctttgctctcttgcctgactgtgcctgcttcagcctacaagtgcgcaactccacggggctttatcatgtcaccaatgattgccctaactcgagtattgtgtacgaggcggccgatgctatcctgcacactccggggtgtgtcccttgcgtctacgagggtaacgcctcgaggtgttggtggcgataacccccacggtggccaccagggacggcaaactccccacagtgcagcttcgacgtcacatcgatctgcttgtcgggagcgctaccctttgttcggccctttacgtgggggacctgtgcggtctgtctttcttgtcggccaactgttcaccttctctcccaggctccactggacaacgcaggactgtaattgttccatctaccccggccatataacgggtcaccgtatggcatgggacatgatgatgaactggtcccctacgcggcgctggtagtagctcagatgctccggatcccgcaagccatcttggacatgatcgctggtgctcactggggagtcccagcgggcatagcgtatttctccatggtggggaactgggcgaaggtcctgtagtgctgctgctatttgccggcgtcgacgcggggacccacgtcaccgggggagctgccggccgtaccacggctggatttgctggtctctttacacgaggcgcccagcagagcatccagttggttaacaccaacggcagtggcacatcaacagaacggctttgaactgcaacgatagccttcagaccggctggatagcggggcttctctatcacaacaaattcaactcttcaggctgtcccgagaggttggccagctgccgacccctaccgattttgcccagggctggggccctatcagttacgccaacggaagcggccccgaccaacgcccctactgctggcactaccccccaaagccttgcggcattgtgcccgcacagagcgtatgtggcccggtatattgtttccccctagccccgtggtggtgggaacgaccgacaggtcgggcgcgcctacctacggatggggtgcaaacgatacggacgtcttcgtcctcaacaacaccaggccaccactgggcaattggttcggttgacctggatgaactcaactggatataccaaagtgtgcggggcgcccccctgtttcatcagaggggtgggcaacaacaccttgcactgccccaccgattgcttccgcaagcatccggaagccacatactctcggtgcggctccgtccctggattacacccaggtgcctggtcaactacccgtataggctttggcattacccttgtaccatcaactacaccgtgttcaaggtcaggatgtacgtgggaggggttgagcataggctagaggcgcctgcaactggacgcggggcgaacgttgcagtctggaagacagggacaggtccgagctcagcccgttgctgctgtccaccacacagtggcaggtccttccctgttccttcacgaccctgccagccttgtccactggcctctccacctccaccagaacattgtggacgtgcagtacttatacggggtggggtcaagtatcgcgtcctgggccatcaagtgggagtacgtcgttctcctattccttctgcttgcagacgcgcgcgtctgtcctgcttgtggatgatgttgctcatatcccaagcggaggcggccttggagaacctcgtagtgctcaatgcagcatctttggccgggacgcatgggtttgtgtccttcctcgtgttcttctgctttgcgtggtacctgaaggtaggtgggtgcccggagcagcctacgccctctacgggatgtggcctctcctcctgctcctgttggcgttgccccagcgggcatacgcgttggacacggaggtggccgcgtcgtgtggcggcgctgtcttgtcgggttgatggcgctgactctgtcaccacattacaagcgatatgtcagctggtgcttgtggtggcttcagtactttctgaccagagcagaagcgcaactgcacgtgtgggttccccccctcgacgtccgagggggggcgacgccgtcatcttactcatgtgtgctgtacgcccgactttggtgtttgacatcaccaagctgctgctggccgtcttcgggcccctttggattctccaagccagtttgctcaaagtaccctacttgtgcgcgttcaaggccttctccggatctgcgcgctagcgcggaagatggcggggggtcattacgtgcaaatggtcatcatcaagctaggggcgctcactggcacctatgtttataaccacctcactcctcttcgggactggcgcacaacggcctgcgagatctggctgtggctgtagagccagtcgtcttctcccgaatggagaccaacctcatcacgtggggggcagacaccgccgcgtgcggtgacatcatcaacggcttgcccgttccgcccgtaggggccgggagatactgctcggaccagccgacggaatggtctccaaggggtggaggttgctggcacccatcacggcatatgcccagcagacgaggggcctcctagggtgtataatcaccagcctaaccggcgggacaaaaaccaggtggagggtgaggtccagattgtgtcaactgctgcccaaactttcctggcaacgtgcatcaatggagtatgctggaccgtctaccacggggccgggacgaggaccatcgcatccccaagggtcctgtcatccagatgtacaccaatgtagacaaagatcttgtgggctggcccgctccccaaggttcccgttcattgacaccctgcacctgcggctcctcggacctttatctggtcacgaggcacgccgatgtcttcccgtgcgccggcggggtgatagcaggggcagcctgctttcgccccggcccatttcctacttgaaaggctcctcggggggtccgctgttgtgccccgcggggcatgctgtgggcatattcagggcgcagtgtgcacccgtggagtggctaaggcggtggactttatccctgtagagaacctagagacaaccatgaggtccccggtgttcacggacaactcctctccaccggcagtaccccagagcttccaggtggcccacctgcatctcccacaggcagcggcaagagcaccaaggtcccggctgcatacgcagctcagggctataaggtgctagtgctcaacccctctgttgctgcaacactaggcttcggtgtttatatgtccaaggcccagggatcgatcctaacatcaggaccggggtgagaacaattaccactggcagccccatcacgtactccacctacggcaagttccttgccgacggcgggtgctcagggggtgcttatgacataataatctgtgacgagtgccacccacggatgccacatctatcttaggcatcggcaccgtccttgaccaagcagagaccgcgggggcgaggcttgttgtgctcgccaccgctacccctccgggctccgtcaccgtgccccatcctaacatgaggaggttgctctgtccaccaccggagagatccctttttatggcaaggctatccccctcgaagtaatcaagggggggaggcatctcatcttctgtcattcaaagaagaagtgtgacgagctcgccgcaaagctggttgcatgggcgtcaatgccgtggcctattaccgcggccttgacgtgtctgtcatcccgaccagcggcgatgttgtcgtcgtggcaactgatgctctcatgaccggctataccggcgacttcgactcggtgatgactgcaacacgtgtgtcacccagacagttgatttcagccttgaccccaccttcaccattgagacaaccacgcttccccaggatgctgtctcccgtacacaacgtcggggcaggactggcagagggaagccaggcacctacgatttgtggcaccgggggagcgcccctccggcatgttcgactcgtctgtcctctgtgagtgctatgacgcgggctgtgcttggtatgagctcacgcccgccgagactacagttaggctacgagcgtaatgaacaccccgggacttcccgtgtgccaggaccaccttgaattttgggagggcgtctttacgggccttactcatatagatgcccacttcctatcccagacaaagcagagcggggagaaccttccttacctggtagcgtacaagccaccgtgtgcgctagggctcaagcccctcccccatcgtgggaccagatgtggaagtgcttggtccgcctcaagcccaccctccatggaccaacacccctgctatacagattgggcgctgttcaaatgagatcaccctgacacacccaatcacaaaatacatcatgacatgtatgtcggctga

SEQ ID NO: 375 - DNA, 4869 bp, Hepatitis C virus
tcgcccacaggacgtcaagttcccgggtggcggtcagatcgttggtggagtttacttgttgccgcgcaggggccctagattgggtgtgcgcgcgacgaggaagacttccgagcggtcgcaacctcgagtagacgtcagcctatccccaaggcacgtcggcccgagggcaggacctgggctcagcccgggtacccctggcccctctatggcaatgagggctgcgggtgggcgggatggctcctgtctccccgtggtctcggcctaactggggccccacagacccccggcgtaggtcgcgtaatttgggtaaggtcatcgatacccttacatgcggcttcgccgacctcatggggtacataccgctcgtcggcgcccctcttgggggcgctgccaggccctggcgcatggcgtccgggttctggaagacggcgtgaactatgcaacagggaaccttcctggttgctctttctctatcttccttctggctttgctctcttgcctgactgtgcctgcttcagcctacaagtgcgcaactccacggggctttatcatgtcaccaatgattgccctaactcgagtattgtgtacgaggcggacgatgctatcctgcacactccggggtgtgtcccttgcgtccgcgagggtaacggctcgaggtgttggtggcgataacccccacggtggccaccagggacggcaaactccccacagtgcagcttcgacgtcacatcgatctgctcgtcgggagcgctaccctttgttcggccctttacgtgggggacctgtgcggtctgtctttcttgttggccaactgttcaccttctctcccaggcgccactggacaacgcaggactgcaattgttccatctatcccggccatataacgggtcaccgtatggcatgggacatgatgatgaactggtcccctacgcggcgctggtagtagctcagatgctccggatcccacaagccatcctggacatgatcgctggtgctcactggggagtcctggcgggcatagcgtatttctccatggtggggaactgggcgaaggtcctgtagtgctgctgctatttgccggcgtcgacgcgggaacccacgtcaccgggggcattgccgcccgtaccacgtctagaattgctggtctcttcaacccaggcgcccagcaggacatccagctggttaacaccaacggcagtggcacatcaacagaacggccttgaactgtaacgatagccttcacaccggctggatagcggggcttttctatcgctacaaattcaactcttcaggctgtcccgagaggttggccagctgccgacccctaccgattttgcccagggctggggccctattagttacgccaacggaagcggccccgaccaacgcccctactgctggcactatcccccaaagccttgcggcattgtgcccgcacagagcgtgtgtggcccggtgtattgcttcctcccagccccgtggtggtgggaacgaccgacaaggcgggcgcgcctacctacagatggggtgcaaacgatacggacgtcttcgtccttaacaacaccaggccaccactgggcaattggttcggttgacctggatgaactcaactggatacaccaaagtgtgcggggcgcccccctgcgtcatcggaggggtgggcaacaagaccttgcactgccccaccgattgtttccgcaagcatccggaagccacatactctcggtgcggctccgtccctggattacacccaggtgtctggtcgactatccgtataggctttggcattacccttgtaccatcaactacaccgtgttcaaagtcaggatgtacgtgggaggggtcgagcataggctggaggcgcctgcaactggacgcggggcgaacgttgcaatctggaagacagggacaggtccgagctcagcccgttgctgctgtccaccacacagtggcaagtccttccgtgttccttcacgaccctgccagccttgtccaccggcctctccacctccaccagaacattgtggacgtgcagtacttatacggggtggggtcaagcatcgcgtcctgggccatcaagtgggagtacgtcgttctcctattccttctgctcgcagacgcgcgcgtctgtcctgcttgtggatgatgatactcatatcccaagcggaggcggctttggagaacctcgtagtgctcaatgcagcatctttggccgggacacacggtcttgtgtccctcctcgtgttcttctgctttgcgtggtacctgaaggtaggtgggtgcccggagcggtctacgccctctacgggatgtggcctctcctcctgctcctattggcgttgccccagcgggcatatgcgttggacacggaggtggccgcgtcgtgtggcggcgctgtcttgtcgggttgatggcgctgactctgtcaccatattacaagcgctatgtcagctggtgcttatggtggcttcagtactttctgaccagagcagaagcgcaactgcacgtgtgggttccccctctcgacgtccgagggggggcgacgccgtcatcttactcatgtgtgctgtacgcccggctttggtgtttgacatcaccaagctgctgctggccgtcctcggacccctctggattctccaagccagtttgcttaaagtgccctacttgtgcgcgttcaaggccttctccggatctgcgcgctagcgcggaagatggcggggggtcattacgtgcaaatggtcatcatcaagttgggggcgctcactggcacttatgtgtataaccatctcactcctcttcgggactggcgcacaacggcctgcgagatctggctgtggctgtagagccagtcgtcttctcccgaatggagaccaacctcatcacgtggggggcagacaccgccgcatgcggcgacatcatcaacggcttgcccgttccgcccgcaggggccgggagatactgctcggaccagccgacggaatggtctccaaggggtggaggttgctggcacccatcacggcatacgcccagcagacaaggggcctcctagggtgtataatcaccagcctaaccggcgggacaaaaatcaggtggagggtgaggtccagattgtgtcaactgctgcccaaacctttctggcaacgtgcatcaatggagtatgctggaccgtctaccacggggccggaacgaggaccatcgcatccccaagggtcctgttatccagatgtacaccaatgtagataaagatctcgtgggttggcccgctcctcaaggttcccgttctttggcaccctgcacctgcggctcctcggacctttatctggtcacgaggcacgccgatgtcttcccgtgcgccggcggggtgatagcaggggcagcctgctttcgccccggcccatttcctacttgaaaggctcctcggggggtccgctgttgtgccccgcggggcacgccgtgggcattttcagggcgcggtgtgcacccgtggagtggctaaggcagtggactttatccctgtagagaacctagagacaaccatgaggtccccggtgttcacggacaactcctctccaccagcagtaccccagagcttccaggtggcccacctgcatctcccacaggcagcggcaagagcaccaaggtcccagctgcatacgcagctcagggctataaggtgctagtgctcaacccctctgttgctgcaacactaggcttcggtgcttatatgtccaaggcccagggatcgaccctaacatcaggaccggggtgagaacaattaccactggcagccctatcacgtactccacctacggcaagttccttgccgacggcgggtgctcagggggtgcttatgacataataatctgtgacgagtgccacccacggatgccacgtccatcttaggcatcggcaccgtccttgaccaagcagagaccgcaggggcgaggcttgttgtgctcgccaccgctacccctccgggctccatcactgtgccccatcctaacatgaggaggttgctctgtccaccaccggagagatccccttttatggcaaggctatccccctcgaagtaatcaagggggggaggcatctcatcttctgtcattcaaagaagaagtgtgacgagctcgctgcaaagctggttgcatgggcgtcaatgccgtggcctattaccgcggtcttgacgtgtctgtcatcccgaccagcggcgatgttgtcgtcgtggcaactgatgctctcatgaccggctataccggcgacttcgactcggtgatgactgcaacacgtgtgtcacccagacagtcgatttcagccttgaccccaccttcaccattgagacaaccacgcttccccaggatgctgtctcccgtacacaacggcggggcaggactggcagggggaagccaggcacctacggtttgtggcaccgggggagcgcccctctggcatgttcgactcgtctgtcctctgtgagtgctatgacgcgggctgtgcttggtatgagctcacgcccgccgagaccacagttaggctacgagcgtaatgaacaccccggggcttcccgtgtgccaggaccaccttgaattttgggagggcgtctttacgggccttacccatatagatgcccacttcctatcccagacaaagcagagtggggagaaccttccttacctggtagcgtacaagccaccgtgtgcgctagggctcaagcccctcccccgtcgtgggaccagatgtggaagtgtttagtccgcctcaagcccaccctccatgggccaacacccctgctatacagattgggcgctgttcaaatgaagtcaccctgacacacccaatcacaaaatacatcatgacatgtatgtcggctga

SEQ ID NO: 376 - DNA, 4869 bp, Hepatitis C virus
tcgcccacaggacgtcaagttcccgggtggcggtcagatcgttggtggagtttacttgttgccgcgcaggggccctagattgggtgtgcgcgcgacgaggaagacttccgagcggtcgcaacctcgagtagacgtcagcctatccccaaggcacgtcggcccgagggcaggacctgggctcagcccgggtacccctggcccctctatggcaatgagggctgcgggtgggcgggatggctcctgtccccccgtggtctcggcctaactggggccccacagacccccggcgtaggtcgcgtaatttgggtaaggtcatcgatacccttacatgcggcttcgccgacctcatggggtacataccgctcgtcggcgcccctcttgggggcgctgccaggccctggcgcatggcgtccgggttctggaagacggcgtgaactatgcaacagggaaccttcctggttgctctttctctatcttccttctggctttgctctcttgcctgactgtgcctgcttcagcctacaagtgcgcaactccacggggctttatcatgtcaccaatgattgccctaactcgagtattgtgtacgaggcggacgatgctatcctgcacactccggggtgtgtcccttgcgtccgcgagggtaacggctcgaggtgttggtggcgataacccccacggtggccaccagggacggcaaactccccacagtgcagcttcgacgtcacatcgatctgctcgtcgggagcgctaccctttgttcggccctttacgtgggggacctgtgcggtctgtctttcttgtcggccaactgttcaccttctctcccaggcgccactggacaacgcaggactgcaattgttccatctatcccggccatataacgggtcaccgtatggcatgggacatgatgatgaactggtcccctacgcggcgctggtagtagctcagatgctccggatcccacaagccatcctggacatgatcgctggtgctcactggggagtcctggcgggcatagcgtatttctccatggtggggaactgggcgaaggtcctgtagtgctgctgctatttgccggcgtcgacgcgggaacccacgtcaccgggggcattgccgcccgtaccacgtctagaattgctggtctcttcaacccaggcgcccagcaggacatccagctggttaacaccaacggcagtggcacatcaacagaacggccttgaactgtaacgatagccttcacaccggctggatagcggggcttttctatcgctacaaattcaactcttcaggctgtcccgagaggttggccagctgccgacccctaccgattttgcccagggctggggccccattagttacgccaacggaagcggccccgaccaacgcccctactgctggcactatcccccaaagccttgcggcattgtgcccgcacagagcgtgtgtggcccggtgtattgcttcctcccagccccgtggtggtgggaacgaccgacaaggcgggcgcgcctacctacagatggggtgcaaacgatacggacgtcttcgtccttaacaacaccaggccaccactgggcaattggttcggttgacctggatgaactcaactggatacaccaaagtgtgcggggcgcccccctgcgtcatcggaggggtgggcaacaagaccttgcactgccccaccgattgtttccgcaagcatccggaagccacatactctcggtgcggctccgtccctggattacacccaggtgtctggtcgactatccgtataggctttggcattacccttgtaccatcaactacaccgtgttcaaagtcaggatgtacgtgggaggggtcgagcataggctggaggcgcctgcaactggacgcggggcgaacgttgcaatctggaagacagggacaggtccgagctcagcccgttgctgctgtccaccacacagtggcaagtccttccgtgttccttcacgaccctgccagccttgtccaccggcctctccacctccaccagaacattgtggacgtgcagtacttatacggggtggggtcaagcatcgcgtcctgggccatcaagtgggagtacgtcgttctcctattccttctgctcgcagacgcgcgcgtccgtcctgcttgtggatgatgttactcatatcccaagcggaggcggctttggagaacctcgtagtgctcaatgcagcatctttggccgggacacacggtcttgtgtccctcctcgtgttcttctgctttgcgtggtacctgaaggtaggtgggtgcccggagcggtctacgccctctacgggatgtggcctctcctcctgctcctattggcgttgccccagcgggcatatgcgttggacacggaggtggccgcgtcgtgtggcggcgctgtcttgtcgggttgatggcgctgactctgtcaccatattacaagcgctatgtcagctggtgcttatggtggcttcagtactttctgaccagagcagaagcgcaactgcacgtgtgggttccccctctcgacgtccgagggggggcgacgccgtcatcttactcatgtgtgctgtacgcccggctttggtgtttgacatcaccaagctgctgctggccgtcctcggacccctctggattctccaagccagtttgcttaaagtgccctacttgtgcgcgttcaaggccttctccggatctgcgcgctagcgcggaagatggcggggggtcattacgtgcaaatggtcatcatcaagttgggggcgctcactggcacttatgtgtataaccatctcactcctcttcgggactggcgcacaacggcctgcgagatctggctgtggctgtagagccagtcgtcttctcccgaatggagaccaacctcatcacgtggggggcagacaccgccgcatgcggcgacatcatcaacggcttgcccgttccgcccgcaggggccgggagatactgctcggaccagccgacggaatggtctccaaggggtggaggttgctggcacccatcacggcatacgcccagcagacaaggggcctcctagggtgtataatcaccagcctaaccggcgggacaaaaatcaggtggagggtgaggtccagattgtgtcaactgctgcccaaacctttctggcaacgtgcatcaatggagtatgctggaccgtctaccacggggccggaacgaggaccatcgcatccccaagggtcctgttatccagatgtacaccaatgtagataaagatctcgtgggttggcccgctcctcaaggttcccgttctttggcaccctgcacctgcggctcctcggacctttatctggtcacgaggcacgccgatgtcttcccgtgcgccggcggggtgatagcaggggcagcctgctttcgccccggcccatttcctacttgaaaggctcctcggggggtccgctgttgtgccccgcggggcacgccgtgggcattttcagggcgcggtgtgcacccgtggagtggctaaggcagtggactttatccctgtagagaacctagagacaaccatgaggtccccggtgttcacggacaactcctctccaccagcagtaccccagagcttccaggtggcccacctgcatctcccacaggcagcggcaagagcaccaaggtcccagctgcatacgcagctcagggctataaggtgctagtgctcaacccctctgttgctgcaacactaggcttcggtgcttatatgtccaaggcccagggatcgaccctaacatcaggaccggggtgagaacaattaccactggcagccccatcacgtactccacctacggcaagttccttgccgacggcgggtgctcagggggtgcttatgacataataatctgtgacgagtgccacccacggatgccacgtccatcttaggcatcggcaccgtccttgaccaagcagagaccgcaggggcgaggcttgttgtgctcgccaccgctacccctccgggctccatcactgtgccccatcctaacatgaggaggttgctctgtccaccaccggagagatccccttttatggcaaggctatccccctcgaagtaatcaagggggggaggcatctcatcttctgtcattcaaagaagaagtgtgacgagctcgctgcaaagctggttgcatgggcgtcaatgccgtggcctattaccgcggtcttgacgtgtctgtcatcccaaccagcggcgatgttgtcgtcgtggcaactgatgctctcatgaccggctataccggcgacttcgactcggtgatgactgcaacacgtgtgtcacccagacagtcgatttcagccttgaccccaccttcaccattgagacaaccacgcttccccaggatgctgtctcccgtacacaacggcggggcaggactggcagggggaagccaggcacctacggtttgtggcaccgggggagcgcccctctggcatgttcgactcgtctgtcctctgtgagtgctatgacgcgggctgtgcttggtatgagctcacgcccgccgagaccacagttaggctacgagcgtaatgaacaccccggggcttcccgtgtgccaggaccaccttgaattttgggagggcgtctttacgggccttacccatatagatgcccacttcctatcccagacaaagcagagtggggagaaccttccttacctggtagcgtacaagccaccgtgtgcgctagggctcaagcccctcccccgtcgtgggaccagatgtggaagtgtttagtccgcctcaagcccaccctccatgggccaacacccctgctatacagattgggcgctgttcaaatgaagtcaccctgacacacccaatcacaaaatacatcatgacatgtatgtcggctga

SEQ ID NO: 377 - DNA, 4869 bp, Hepatitis C virus; identical to SEQ ID NO: 194

SEQ ID NO: 378 - DNA, 4869 bp, Hepatitis C virus
tcgcccacaggacgtcaagttcccgggtggcggtcagatcgttggtggagtttacttgttgccgcgcaggggccctagattgggtgtgcgcgcgacgaggaagacttccgagcggtcgcaacctcgagtagacgtcagcctatccccaaggcacgtcggcccgagggcaggacctgggctcagcccgggtacccctggcccctctatggcaatgagggctgcgggtgggcgggatggctcctgtctccccgtggtctcggcctaactggggccccacagacccccggcgtaggtcgcgtaatttgggtaaggtcatcgatacccttacatgcggcttcgccgacctcatggggtacataccgctcgtcggcgcccctcttgggggcgctgccaggccctggcgcatggcgtccgggttctggaagacggcgtgaactatgcaacagggaaccttcctggttgctctttctctatcttccttctggctttgctctcttgcctgactgtgcctgcttcagcctacaagtgcgcaactccacggggctttatcatgtcaccaatgattgccctaactcgagtattgtgtacgaggcggacgatgctatcctgcacactccggggtgtgtcccttgcgtccgcgagggtaacggctcgaggtgttggtggcgataacccccacggtggccaccagggacggcaaactccccacagtgcagcttcgacgtcacatcgatctgctcgtcgggagcgctaccctttgttcggccctttacgtgggggacctgtgcggtctgtctttcttgtcggccaactgttcaccttctctcccaggcgccactggacaacgcaggactgcaattgttccatctatcccggccatataacgggtcaccgtatggcatgggacatgatgatgaactggtcccctacgcggcgctggtagtagctcagatgctccggatcccacaagccatcctggacatgatcgctggtgctcactggggagtcctggcgggcatagcgtatttctccatggtggggaactgggcgaaggtcctgtagtgctgctgctatttgccggcgtcgacgcgggaacccacgtcaccgggggcattgccgcccgtaccacgtctagaattgctggtctcttcaacccaggcgcccagcaggacatccagctggttaacaccaacggcagtggcacatcaacagaacggccttgaactgtaacgatagccttcacaccggctggatagcggggcttttctatcgctacaaattcaactcttcaggctgtcccgagaggttggccagctgccgacccctaccgattttgcccagggctggggccctattagttacgccaacggaagcggccccgaccaacgcccctactgctggcactatcccccaaagccttgcggcattgtgcccgcacagagcgtgtgtggcccggtgtattgcttcctcccagccccgtggtggtgggaacgaccgacaaggcgggcgcgcctacctacagatggggtgcaaacgatacggacgtcttcgtccttaacaacaccaggccaccactgggcaattggttcggttgacctggatgaactcaactggatacaccaaagtgtgcggggcgcccccctgcgtcatcggaggggtgggcaacaagaccttgcactgccccaccgattgtttccgcaagcatccggaagccacatactctcggtgcggctccgtccctggattacacccaggtgtctggtcgactatccgtataggctttggcattacccttgtaccatcaactacaccgtgttcaaagtcaggatgtacgtgggaggggtcgagcataggctggaggcgcctgcaactggacgcggggcgaacgttgcaatctggaagacagggacaggtccgagctcagcccgttgctgctgtccaccacacagtggcaagtccttccgtgttccttcacgaccctgccagccttgtccaccggcctctccacctccaccagaacattgtggacgtgcagtacttatacggggtggggtcaagcatcgcgtcctgggccatcaagtgggagtacgtcgttctcctattccttctgctcgcagacgcgcgcgtctgtcctgcttgtggatgatgttactcatatcccaagcggaggcggctttggagaacctcgtagtgctcaatgcagcatctttggccgggacacacggtcttgtgtccctcctcgtgttcttctgctttgcgtggtacctgaaggtaggtgggtgcccggagcggtctacgccctctacgggatgtggcctctcctcctgctcctattggcgttgccccagcgggcatatgcgttggacacggaggtggccgcgtcgtgtggcggcgctgtcttgtcgggttgatggcgctgactctgtcaccatattacaagcgctatgtcagctggtgcttatggtggcttcagtactttctgaccagagcagaagcgcaactgcacgtgtgggttccccctctcgacgtccgagggggggcgacgccgtcatcttactcatgtgtgctgtacgcccggctttggtgtttgacatcaccaagctgctgctggccgtcctcggacccctctggattctccaagccagtttgcttaaagtgccctacttgtgcgcgttcaaggccttctccggatctgcgcgctagcgcggaagatggcggggggtcattacgtgcaaatggtcatcatcaagttgggggcgctcactggcacttatgtgtataaccatctcactcctcttcgggactggcgcacaacggcctgcgagatctggctgtggctgtagagccagtcgtcttctcccgaatggagaccaacctcatcacgtggggggcagacaccgccgcatgcggcgacatcatcaacggcttgcccgttccgcccgcaggggccgggagatactgctcggaccagccgacggaatggtctccaaggggtggaggttgctggcacccatcacggcatacgcccagcagacaaggggcctcctagggtgtataatcaccagcctaaccggcgggacaaaaatcaggtggagggtgaggtccagattgtgtcaactgctgcccaaacctttctggcaacgtgcatcaatggagtatgctggaccgtctaccacggggccggaacgaggaccatcgcatccccaagggtcctgttatccagatgtacaccaatgtagataaagatctcgtgggttggcccgctcctcaaggttcccgttctttggcaccctgcacctgcggctcctcggacctttatctggtcacgaggcacgccgatgtcttcccgtgcgccggcggggtgatagcaggggcagcctgctttcgccccggcccatttcctacttgaaaggctcctcggggggtccgctgttgtgccccgcggggcacgccgtgggcattttcagggcgcggtgtgcacccgtggagtggctaaggcagtggactttatccctgtagagaacctagagacaaccatgaggtccccggtgttcacggacaactcctctccaccagcagtaccccagagcttccaggtggcccacctgcatctcccacaggcagcggcaagagcaccaaggtcccagctgcatacgcagctcagggctataaggtgctagtgctcaacccctctgttgctgcaacactaggcttcggtgcttatatgtccaaggcccagggatcgaccctaacatcaggaccggggtgagaacaattaccactggcagccccatcacgtactccacctacggcaagttccttgccgacggcgggtgctcagggggtgcttatgacataataatctgtgacgagtgccacccacggatgccacgtccatcttaggcatcggcaccgtccttgaccaagcagagaccgcaggggcgaggcttgttgtgctcgccaccgctacccctccgggctccatcactgtgccccatcctaacatgaggaggttgctctgtccaccaccggagagatccccttttatggcaaggctatccccctcgaagtaatcaagggggggaggcatctcatcttctgtcattcaaagaagaagtgtgacgagctcgctgcaaagctggttgcatgggcgtcaatgccgtggcctattaccgcggtcttgacgtgtctgtcatcccgaccagcggcgatgttgtcgtcgtggcaactgatgctctcatgaccggttataccggcgacttcgactcggtgatgactgcaacacgtgtgtcacccagacagtcgatttcagccttgaccccaccttcaccattgagacaaccacgcttccccaggatgctgtctcccgtacacaacggcggggcaggactggcagggggaagccaggcacctacggtttgtggcaccgggggagcgcccctctggcatgttcgactcgtctgtcctctgtgagtgctatgacgcgggctgtgcttggtatgagctcacgcccgccgagaccacagttaggctacgagcgtaatgaacaccccggggcttcccgtgtgccaggaccaccttgaattttgggagggcgtctttacgggccttacccatatagatgcccacttcctatcccagacaaagcagagtggggagaaccttccttacctggtagcgtacaagccaccgtgtgcgctagggctcaagcccctcccccgtcgtgggaccagatgtggaagtgtttagtccgcctcaagcccaccctccatgggccaacacccctgctatacagattgggcgctgttcaaatgaagtcaccctgacacacccaatcacaaaatacatcatgacatgtatgtcggctga

SEQ ID NO: 379 - DNA, 4869 bp, Hepatitis C virus
tcgcccacaggacgtcaagttcccgggtggcggtcagatcgttggtggagtttacttgttgccgcgcaggggccctagattgggtgtgcgcgcgacgaggaagacttccgagcggtcgcaacctcgagtagacgtcagcctatccccaaggcacgtcggcccgagggcaggacctgggctcagcccgggtacccctggcccctctatggcaatgagggctgcgggtgggcgggatggctcctgtctccccgtggtctcggcctaactggggccccacagacccccggcgtaggtcgcgtaatttgggtaaggtcatcgatacccttacatgcggcttcgccgacctcatggggtacataccgctcgtcggcgcccctcttgggggcgctgccaggccctggcgcatggcgtccgggttctggaagacggcgtgaactatgcaacagggaaccttcctggttgctctttctctatcttccttctggctttgctctcttgcctgactgtgcctgcttcagcctacaagtgcgcaactccacggggctttatcatgtcaccaatgattgccctaactcgagtattgtgtacgaggcggacgatgctatcctgcacactccggggtgtgtcccttgcgtccgcgagggtaacggctcgaggtgttggtggcgataacccccacggtggccaccagggacggcaaactccccacagtgcagcttcgacgtcacatcgatctgctcgtcgggagcgctaccctttgttcggccctttacgtgggggacctgtgcggtctgtctttcttgtcggccaactgttcaccttctctcccaggcgccactggacaacgcaggactgcaattgttccatctatcccggccatataacgggtcaccgtatggcatgggacatgatgatgaactggtcccctacgcggcgctggtagtagctcagatgctccggatcccacaagccatcctggacatgatcgctggtgctcactggggagtcctggcgggcatagcgtatttctccatggtggggaactgggcgaaggtcctgtagtgctgctgctatttgccggcgtcgacgcgggaacccacgtcaccgggggcattgccgcccgtaccacgtctagaattgctggtctcttcaacccaggcgcccagcaggacatccagctggttaacaccaacggcagtggcacatcaacagaacggccttgaactgtaacgatagccttcacaccggctggatagcggggcttttctatcgctacaaattcaactcttcaggctgtcccgagaggttggccagctgccgacccctaccgattttgcccagggctggggccctattagttacgccaacggaagcggccccgaccaacgcccctactgctggcactatcccccaaagccttgcggcattgtgcccgcacagagcgtgtgtggcccggtgtattgcttcctcccagccccgtggtggtgggaacgaccgacaaggcgggcgcgcctacctacagatggggtgcaaacgatacggacgtcttcgtccttaacaacaccaggccaccactgggcaattggttcggttgacctggatgaactcaactggatacaccaaagtgtgcggggcgcccccctgcgtcatcggaggggtgggcaacaagaccttgcactgccccaccgattgtttccgcaagcatccggaagccacatactctcggtgcggctccgtccctggattacacccaggtgtctggtcgactatccgtataggctttggcattacccttgtaccatcaactacaccgtgttcaaagtcaggatgtacgtgggaggggtcgagcataggctggaggcgcctgcaactggacgcggggcgaacgttgcaatctggaagacagggacaggtccgagctcagcccgttgctgctgtccaccacacagtggcaagtccttccgtgttccttcacgaccctgccagccttgtccaccggcctctccacctccaccagaacattgtggacgtgcagtacttatacggggtggggtcaagcatcgcgtcctgggccatcaagtgggagtacgtcgttctcctattccttctgctcgcagacgcgcgcgtctgtcctgcttgtggatgatgttactcatatcccaagcggaggcggctttggagaacctcgtagtgctcaatgcagcatctttggccgggacacacggtcttgtgtccctcctcgtgttcttctgctttgcgtggtacctgaaggtaggtgggtgcccggagcggtctacgccctctacgggatgtggcctctcctcctgctcctattggcgttgccccagcgggcatatgcgttggacacggaggtggccgcgtcgtgtggcggcgctgtcttgtcgggttgatggcgctgactctgtcaccatattacaagcgctatgtcagctggtgcttatggtggcttcagtactttctgaccagagcagaagcgcaactgcacgtgtgggttccccctctcgacgtccgagggggggcgacgccgtcatcttactcatgtgtgctgtacgcccggctttggtgtttgacatcaccaagctgctgctggccgtcctcggacccctctggattctccaagccagtttgcttaaagtgccctacttgtgcgcgttcaaggccttctccggatctgcgcgctagcgcggaagatggcggggggtcattacgtgcaaatggtcatcatcaagttgggggcgctcactggcacttatgtgtataaccatctcactcctcttcgggactggcgcacaacggcctgcgagatctggctgtggctgtagagccagtcgtcttctcccgaatggagaccaacctcatcacgtggggggcagacaccgccgcatgcggcgacatcatcaacggcttgcccgttccgcccgcaggggccgggagatactgctcggaccagccgacggaatggtctccaaggggtggaggttgctggcacccatcacggcatacgcccagcagacaaggggcctcctagggtgtataatcaccagcctaaccggcgggacaaaaatcaggtggagggtgaggtccagattgtgtcaactgctgcccaaacctttctggcaacgtgcatcaatggagtatgctggaccgtctaccacggggccggaacgaggaccatcgcatccccaagggtcctgttatccagatgtacaccaatgtagataaagatctcgtgggttggcccgttcctcaaggttcccgttctttggcaccctgcacctgcggctcctcggacctttatctggtcacgaggcacgccgatgtcttcccgtgcgccggcggggtgatagcaggggcagcctgctttcgccccggcccatttcctacttgaaaggctcctcggggggtccgctgttgtgccccgcggggcacgccgtgggcattttcagggcgcggtgtgcacccgtggagtggctaaggcagtggactttatccctgtagagaacctagagacaaccatgaggtccccggtgttcacggacaactcctctccaccagcagtaccccagagcttccaggtggcccacctgcatctcccacaggcagcggcaagagcaccaaggtcccagctgcatacgcagctcagggctataaggtgctagtgctcaacccctctgttgctgcaacactaggcttcggtgcttatatgtccaaggcccagggatcgaccctaacatcaggaccggggtgagaacaattaccactggcagccccatcacgtactccacctacggcaagttccttgccgacggcgggtgctcagggggtgcttatgacataataatctgtgacgagtgccacccacggatgccacgtccatcttaggcatcggcaccgtccttgaccaagcagagaccgcaggggcgaggcttgttgtgctcgccaccgctacccctccgggctccatcactgtgccccatcctaacatgaggaggttgctctgtccaccaccggagagatccccttttatggcaaggctatccccctcgaagtaatcaagggggggaggcatctcatcttctgtcattcaaagaagaagtgtgacgagctcgctgcaaagctggttgcatgggcgtcaatgccgtggcctattaccgcggtcttgacgtgtctgtcatcccgaccagcggcgatgttgtcgtcgtggcaactgatgctctcatgaccggctataccggcgacttcgactcggtgatgactgcaacacgtgtgtcacccagacagtcgatttcagccttgaccccaccttcaccattgagacaaccacgcttccccaggatgctgtctcccgtacacaacggcggggcaggactggcagggggaagccaggcacctacggtttgtggcaccgggggagcgcccctctggcatgttcgactcgtctgtcctctgtgagtgctatgacgcgggctgtgcttggtatgagctcacgcccgccgagaccacagttaggctacgagcgtaatgaacaccccggggcttcccgtgtgccaggaccaccttgaattttgggagggcgtctttacgggccttacccatatagatgcccacttcctatcccagacaaagcagagtggggagaaccttccttacctggtagcgtacaagccaccgtgtgcgctagggctcaagcccctcccccgtcgtgggaccagatgtggaagtgtttagtccgcctcaagcccaccctccatgggccaacacccctgctatacagattgggcgctgttcaaatgaagtcaccctgacacacccaatcacaaaatacatcatgacatgtatgtcggctga

SEQ ID NO: 380 - DNA, 4869 bp, Hepatitis C virus
tcgcccacaggacgtcaagttcccgggtggcggtcagatcgttggtggagtttacttgttgccgcgcaggggccctagattgggtgtgcgcgcgacgaggaagacttccgagcggtcgcaacctcgagcagacgtcagcctatccccaaggcacgtcggcccgagggtaggacctgggctcagcccgggtacccctggcccctctatggcaatgagggctgtgggtgggcgggatggctcctgtctccccgtggtctcggcctaactggggcccctcagacccccggcgtaggtcgcgtaatttgggtaaagtcatcgatacccttacatgcggcttcgccgacctcatggggtacataccgctcgtcggcgcccctcttgggggcgctgccaggccctggcgcatggcgtccgggttctggaagacggcgtgaactatgcaacagggaaccttcctggttgctctttctctatcttcttcctggctttgctctcttgtctgactgtgcctgcttcagcctacaagtgcgcaactccacggggctttatcatgtcaccaatgattgccctaactcgagtattgtgtacgaggcggccgatgctatcctgcacactccggggtgtgtcccttgcgtctacgagggtaacgcctcgaggtgttggtggcgataacccccacggtggccaccagggacggcaaactccccacagtgcagcttcgacgtcacatcgatctgcttgtcgggagcgctaccctttgttcggccctttacgtgggggacctgtgcggtctgtctttcttgtcggccaactgttcaccttctctcccaggctccactggacaacgcaggactgtaattgttccatctaccccggccatataacgggtcaccgtatggcatgggacatgatgatgaactggtcccctacgcggcgctggtagtagctcagatgctccggatcccgcaagccatcttggacatgatcgctggtgctcactggggagtcctagcgggcatagcgtatttctccatggtggggaactgggcgaaggtcctgtagtgctgctgctatttgccggcgtcgacgcggggacccacgtcaccgggggagctgccggccgtaccacggctggatttgctggtctctttacacgaggcgcccagcagagcatccagttggttaacaccaacggcagtggcacatcaacagaacggctttgaactgcaacgatagccttcagaccggctggatagcggggcttctctatcacaacaaattcaactcttcaggctgtcccgagaggttggccagctgccgacccctaccgattttgcccagggctggggccctatcagttacgccaacggaagcggccccgaccaacgcccctactgctggcactaccccccaaagccttgcggcattgtgcccgcacagagcgtatgtggcccggtatattgtttccccctagccccgtggtggtgggaacgaccgacaggtcgggcgcgcctacctacggatggggtgcaaacgatacggacgtcttcgtcctcaacaacaccaggccaccactgggcaattggttcggttgacctggatgaactcaactggatataccaaagtgtgcggggcgcccccctgtttcatcagaggggtgggcaacaacaccttgcactgccccaccgattgcttccgcaagcatccggaagccacatactctcggtgcggctccgtccctggattacacccaggtgcctggtcaactacccgtataggctttggcattacccttgtaccatcaactacaccgtgttcaaggtcaggatgtacgtgggaggggttgagcataggctagaggcgcctgcaactggacgcggggcgaacgttgcagtctggaagacagggacaggtccgagctcagcccgttgctgctgtccaccacacagtggcaggtccttccctgttccttcacgaccctgccagccttgtccactggcctctccacctccaccagaacattgtggacgtgcagtacttatacggggtggggtcaagtatcgcgtcctgggccatcaagtgggagtacgtcgttctcctattccttctgcttgcagacgcgcgcgtctgtcctgcttgtggatgatgttgctcatatcccaagcggaggcggccttggagaacctcgtagtgctcaatgcagcatctttggccgggacgcatgggtttgtgtccttcctcgtgttcttctgctttgcgtggtacctgaaggtaggtgggtgcccggagcagcctacgccctctacgggatgtggcctctcctcctgctcctgttggcgttgccccagcgggcatacgcattggacacggaggtggccgcgtcgtgtggcggcgctgtcttgtcgggttgatggcgctgactctgtcaccacattacaagcgatatgtcagctggtgcttgtggtggcttcagtactttctgaccagagcagaagcgcaactgcacgtgtgggttccccccctcgacgtccgagggggggcgacgccgtcatcttactcatgtgtgctgtacgcccgactttggtgtttgacatcaccaagctgctgctggccgtcttcgggcccctttggattctccaagccagtttgctcaaagtaccctacttgtgcgcgttcaaggccttctccggatctgcgcgctagcgcggaagatggcggggggtcattacgtgcaaatggtcatcatcaagctaggggcgctcactggcacctatgtttataaccacctcactcctcttcgggactggcgcacaacggcctgcgagatctggctgtggctgtagagccagtcgtcttctcccgaatggagaccaacctcatcacgtggggggcagacaccgccgcgtgcggtgacatcatcaacggcttgcccgttccgcccgtaggggccgggagatactgctcggaccagccgacggaatggtctccaaggggtggaggttgctggcacccatcacggcatatgcccagcagacgaggggcctcctagggtgtataatcaccagcctaaccggcgggacaaaaaccaggtggagggtgaggtccagattgtgtcaactgctgcccaaactttcctggcaacgtgcatcaatggagtatgctggaccgtctaccacggggccgggacgaggaccatcgcatccccaagggtcctgtcatccagatgtacaccaatgtagacaaagatcttgtgggctggcccgctccccaaggttcccgttcattgacaccctgcacctgcggctcctcggacctttatctggtcacgaggcacgccgatgtcttcccgtgcgccggcggggtgatagcaggggcagcctgctttcgccccggcccatttcctacttgaaaggctcctcggggggtccgctgttgtgccccgcggggcatgctgtgggcatattcagggcgcagtgtgcacccgtggagtggctaaggcggtggactttatccctgtagagaacctagagacaaccatgaggtccccggtgttcacggacaactcctctccaccggcagtaccccagagcttccaggtggcccacctgcatctcccacaggcagcggcaagagcaccaaggtcccggctgcatacgcagctcagggctataaggtgctagtgctcaacccctctgttgctgcaacactaggcttcggtgtttatatgtccaaggcccagggatcgatcctaacatcaggaccggggtgagaacaattaccactggcagccccatcacgtactccacctacggcaagttccttgccgacggcgggtgctcagggggtgcttatgacataataatctgtgacgagtgccacccacggatgccacatctatcttaggcatcggcaccgtccttgaccaagcagagaccgcgggggcgaggcttgttgtgctcgccaccgctacccctccgggctccgtcaccgtgccccatcctaacatgaggaggttgctctgtccaccaccggagagatccctttttatggcaaggctatccccctcgaagtaatcaagggggggaggcatctcatcttctgtcattcaaagaagaagtgtgacgagctcgccgcaaagctggttgcatgggcgtcaatgccgtggcctattaccgcggccttgacgtgtctgtcatcccgaccagcggcgatgttgtcgtcgtggcaactgatgctctcatgaccggctataccggcgacttcgactcggtgatgactgcaacacgtgtgtcacccagacagttgatttcagccttgaccccaccttcaccattgagacaaccacgcttccccaggatgctgtctcccgtacacaacgtcggggcaggactggcagagggaagccaggcacctacgatttgtggcaccgggggagcgcccctccggcatgttcgactcgtctgtcctctgtgagtgctatgacgcgggctgtgcttggtatgagctcacgcccgccgagactacagttaggctacgagcgtaatgaacaccccgggacttcccgtgtgccaggaccaccttgaattttgggagggcgtctttacgggccttactcatatagatgcccacttcctatcccagacaaagcagagcggggagaaccttccttacctggtagcgtacaagccaccgtgtgcgctagggctcaagcccctcccccatcgtgggaccagatgtggaagtgcttggtccgcctcaagcccaccctccatggaccaacacccctgctatacagattgggcgctgttcaaatgagatcaccctgacacacccaatcacaaaatacatcatgacatgtatgtcggctga

SEQ ID NO: 381 - DNA, 4869 bp, Hepatitis C virus
tcgcccacaggacgtcaagttcccgggtggcggtcagatcgttggtggagtttacttgttgccgcgcaggggccctagattgggtgtgcgcgcgacgaggaagacttccgagcggtcgcaacctcgagtagacgtcagcctatccccaaggcacgtcggcccgagggcaggacctgggctcagcccgggtacccctggcccctctatggcaatgagggctgcgggtgggcgggatggctcctgtctccccgtggtctcggcctaactggggccccacagacccccggcgtatgtcgcgtaatttgggtaaggtcatcgatacccttacatgcggcttcgccgacctcatggggtacataccgctcgtcggcgcccctcttgggggcgctgccaggccctggcgcatggcgtccgggttctggaagacggcgtgaactatgcaacagggaaccttcctggttgctctttctctatcttccttctggctttgctctcttgcctgactgtgcctgcttcagcctacaagtgcgcaactccacggggctttatcatgtcaccaatgattgccctaactcgagtattgtgtacgaggcggacgatgctatcctgcacactccggggtgtgtcccttgcgtccgcgagggtaacggctcgaggtgttggtggcgataacccccacggtggccaccagggacggcaaactccccacagtgcagcttcgacgtcacatcgatctgctcgtcgggagcgctaccctttgttcggccctttacgtgggggacctgtgcggtctgtctttcttgtcggccaactgttcaccttctctcccaggcgccactggacaacgcaggactgcaattgttccatctatcccggccatataacgggtcaccgtatggcatgggacatgatgatgaactggtcccctacgcggcgctggtagtagctcagatgctccggatcccacaagccatcctggacatgatcgctggtgctcactggggagtcctggcgggcatagcgtatttctccatggtggggaactgggcgaaggtcctgtagtgctgctgctatttgccggcgtcgacgcgggaacccacgtcaccgggggcattgccgcccgtaccacgtctagaattgctggtctcttcaacccaggcgcccagcaggacatccagctggttaacaccaacggcagtggcacatcaacagaacggccttgaactgtaacgatagccttcacaccggctggatagcggggcttttctatcgctacaaattcaactcttcaggctgtcccgagaggttggccagctgccgacccctaccgattttgcccagggctggggccctattagttacgccaacggaagcggccccgaccaacgcccctactgctggcactatcccccaaagccttgcggcattgtgcccgcacagagcgtgtgtggcccggtgtattgcttcctcccagccccgtggtggtgggaacgaccgacaaggcgggcgcgcctacctacagatggggtgcaaacgatacggacgtcttcgtccttaacaacaccaggccaccactgggcaattggttcggttgacctggatgaactcaactggatacaccaaagtgtgcggggcgcccccctgcgtcatcggaggggtgggcaacaagaccttgcactgccccaccgattgtttccgcaagcatccggaagccacatactctcggtgcggctccgtccctggattacacccaggtgtctggtcgactatccgtataggctttggcattacccttgtaccatcaactacaccgtgttcaaagtcaggatgtacgtgggaggggtcgagcataggctggaggcgcctgcaactggacgcggggcgaacgttgcaatctggaagacagggacaggtccgagctcagcccgttgctgctgtccaccacacagtggcaagtccttccgtgttccttcacgaccctgccagccttgtccaccggcctctccacctccaccagaacattgtggacgtgcagtacttatacggggtggggtcaagcatcgcgtcctgggccatcaagtgggagtacgtcgttctcctattccttctgctcgcagacgcgcgcgtctgtcctgcttgtggatgatgttactcatatcccaagcggaggcggctttggagaacctcgtagtgctcaatgcagcatctttggccgggacacacggtcttgtgtccctcctcgtgttcttctgctttgcgtggtacctgaaggtaggtgggtgcccggagcggtctacgccctctacgggatgtggcctctcctcctgctcctattggcgttgccccagcgggcatatgcgttggacacggaggtggccgcgtcgtgtggcggcgctgtcttgtcgggttgatggcgctgactctgtcaccatattacaagcgctatgtcagctggtgcttatggtggcttcagtactttctgaccagagcagaagcgcaactgcacgtgtgggttccccctctcgacgtccgagggggggcgacgccgtcatcttactcatgtgtgctgtacgcccggctttggtgtttgacatcaccaagctgctgctggccgtcctcggacccctctggattctccaagccagtttgcttaaagtgccctacttgtgcgcgttcaaggccttctccggatctgcgcgctagcgcggaagatggcggggggtcattacgtgcaaatggtcatcatcaagttgggggcgctcactggcacttatgtgtataaccatctcactcctcttcgggactggcgcacaacggcctgcgagatctggctgtggctgtagagccagtcgtcttctcccgaatggagaccaacctcatcacgtggggggcagacaccgccgcatgcggcgacatcatcaacggcttgcccgttccgcccgcaggggccgggagatactgctcggaccagccgacggaatggtctccaaggggtggaggttgctggcacccatcacggcatacgcccagcagacaaggggcctcctagggtgtataatcaccagcctaaccggcgggacaaaaatcaggtggagggtgaggtccagattgtgtcaactgctgcccaaacctttctggcaacgtgcatcaatggagtatgctggaccgtctaccacggggccggaacgaggaccatcgcatccccaagggtcctgttatccagatgtacaccaatgtagataaagatctcgtgggttggcccgctcctcaaggttcccgttctttggcaccctgcacctgcggctcctcggacctttatctggtcacgaggcacgccgatgtcttcccgtgcgccggcggggtgatagcaggggcagcctgctttcgccccggcccatttcctacttgaaaggctcctcggggggtccgctgttgtgccccgcggggcacgccgtgggcattttcagggcgcggtgtgcacccgtggagtggctaaggcagtggactttatccctgtagagaacctagagacaaccatgaggtccccggtgttcacggacaactcctctccaccagcagtaccccagagcttccaggtggcccacctgcatctcccacaggcagcggcaagagcaccaaggtcccagctgcatacgcagctcagggctataaggtgctagtgctcaacccctctgttgctgcaacactaggcttcggtgcttatatgtccaaggcccagggatcgaccctaacatcaggaccggggtgagaacaattaccactggcagccccatcacgtactccacctacggcaagttccttgccgacggcgggtgctcagggggtgcttatgacataataatctgtgacgagtgccacccacggatgccacgtccatcttaggcatcggcaccgtccttgaccaagcagagaccgcaggggcgaggcttgttgtgctcgccaccgctacccctccgggctccatcactgtgccccatcctaacatgaggaggttgctctgtccaccaccggagagatccccttttatggcaaggctatccccctcgaagtaatcaagggggggaggcatctcatcttctgtcattcaaagaagaagtgtgacgagctcgctgcaaagctggttgcatgggcgtcaatgccgtggcctattaccgcggtcttgacgtgtctgtcatcccgaccagcggcgatgttgtcgtcgtggcaactgatgctctcatgaccggctataccggcgacttcgactcggtgatgactgcaacacgtgtgtcacccagacagtcgatttcagccttgaccccaccttcaccattgagacaaccacgcttccccaggatgctgtctcccgtacacaacggcggggcaggactggcagggggaagccaggcacctacggtttgtggcaccgggggagcgcccctctggcatgttcgactcgtctgtcctctgtgagtgctatgacgcgggctgtgcttggtatgagctcacgcccgccgagaccacagttaggctacgagcgtaatgaacaccccggggcttcccgtgtgccaggaccaccttgaattttgggagggcgtctttacgggccttacccatatagatgcccacttcctatcccagacaaagcagagtggggagaaccttccttacctggtagcgtacaagccaccgtgtgcgctagggctcaagcccctcccccgtcgtgggaccagatgtggaagtgtttagtccgcctcaagcccaccctccatgggccaacacccctgctatacagattgggcgctgttcaaatgaagtcaccctgacacacccaatcacaaaatacatcatgacatgtatgtcggctga

SEQ ID NO: 382 - DNA, 4869 bp, Hepatitis C virus
tcgcccacaggacgtcaagttcccgggtggcggtcagatcgttggtggagtttacttgttgccgcgcaggggccctagattgggtgtgcgcgcgacgaggaagacttccgagcggtcgcaacctcgagtagacgtcagcctatccccaaggcacgtcggcccgagggcaggacctgggctcagcccgggtacccctggcccctctatggcaatgagggctgcgggtgggcgggatggctcctgtctccccgtggtctcggcctaactggggccccacagacccccggcgtaggtcgcgtaatttgggtaaggtcatcgatacccttacatgcggcttcgccgacctcatggggtacataccgctcgtcggcgcccctcttgggggcgctgccaggccctggcgcatggcgtccgggttctggaagacggcgtgaactatgcaacagggaaccttcctggttgctctttctctatcttccttctggctttgctctcttgcctgactgtgcctgtttcagcctacaagtgcgcaactccacggggctttatcatgtcaccaatgattgccctaattcgagtattgtgtacgaggcggacgatgctatcctgcacactccggggtgtgtcccttgcgtccgcgagggtaacggctcgaggtgttggtggcgataacccccacggtggccaccagggacggcaaactccccacagtgcagcttcgacgtcacatcgatctgcttgtcgggagcgctaccctttgttcggccctttacgtgggggacctgtgcggtctgtctttcttgtcggccaactgttcaccttctctcccaggcgccactggacaacgcaggactgcaattgttccatctatcccggccatataacgggtcaccgtatggcatgggacatgatgatgaactggtcccctacgcggcgctggtagtagctcagatgctccggatcccacaagccatcctggacatgatcgctggtgctcactggggagtcctggcgggcatagcgtatttctccatggtggggaactgggcgaaggtcctgtagtgctgctgctatttgccggcgtcgacgcgggaacccacgtcaccgggggcattgccgcccgtaccacgtctagaattgctggtctcttcaacccaggcgcccagcaggacatccagctggttaacaccaacggcagtggcacatcaacagaacggccttgaactgtaacgatagccttcacaccggctggatagcggggcttttctatcgctacaaattcaactcttcaggctgtcccgagaggttggccagctgccgacccctaccgattttgcccagggctggggccctattagttacgccaacggaagcggccccgaccaacgcccctactgctggcactatcccccaaagccttgcggcattgtgcccgcacagagcgtgtgtggcccggtgtattgcttcctcccagccccgtggtggtgggaacgaccgacaaggcgggcgcgcctacctacagatggggtgcaaacgatacggacgtcttcgtccttaacaacaccaggccaccactgggcaattggttcggttgacctggatgaactcaactggatacaccaaagtgtgcggggcgcccccctgcgtcatcggaggggtgggcaacaagaccttgcactgccccaccgattgtttccgcaagcatccggaagccacatactctcggtgcggctccgtccctggattacacccaggtgcctggtcgactatccgtataggctttggcatcacccttgtaccatcaactacaccgtgttcaaagtcaggatgtacgtgggaggggtcgagcataggctagaggcgcctgcaactggacgcggggcgaacgttgcaatctggaagacagggacaggtccgagctcagcccgttgctgctgtccaccacacagtggcaagtccttccgtgttccttcacgaccctgccagccttgtccaccggcctctccacctccaccagaacattgtggacgtgcagtacttatacggggtggggtcaagcatcgcgtcctgggccatcaagtgggagtacgtcgttctcctattccttctgctcgcagacgcgcgcgtctgtcctgcttgtggatgatgttactcatatcccaagcggaggcggctttggagaacctcgtagtgctcaatgcagcatctttggccgggacacacggtcttgtgtccctcctcgtgttcttctgctttgcgtggtacctgaaggtaggtgggtgcccggagcggtctacgccctctacgggatgtggcctctcctcctgctcctattggcgttgccccagcgggcatatgcgttggacacggaggtggccgcgtcgtgtggcggcgctgtcttgtcgggttgatggcgctgactctgtcaccatattacaagcgctatgtcagctggtgcttatggtggcttcagtactttctgaccagagcagaagcgcaactgcacgtgtgggttccccctctcgacgtccgagggggggcgacgccgtcatcttactcatgtgtgctgtacgcccgactttggtgtttgacatcaccaagctgctgctggccgtcctcggacccctctggattctccaagccagtttgcttaaagtgccctacttgtgcgcgttcaaggccttctccggatctgcgcgctagcgcggaagatggcggggggtcattacgtgcaaatggtcatcatcaagttgggggcgctcactggcacttatgtgtataaccatctcactcctcttcgggactggcgcacaacggcctgcgagatctggctgtggctgtagagccagtcgtcttctcccgaatggagaccaacctcattacgtggggggcagacaccgccgcatgcggcgacatcatcaacggcttgcccgttccgcccgcaggggccgggagatactgctcggaccagccgacggaatggtctccaaggggtggaggttgctggcacccatcacggcgtacgcccagcagacaaggggcctcctagggtgtataatcaccagcctaaccggcgggacaaaaatcaggtggagggtgaggtccagattgtgtcaactgctgcccaaacctttctggcaacgtgcatcaatggagtatgctggaccgtctaccacggggccggaacgaggaccatcgcatccccaagggtccggttatccagatgtacaccaatgtagacaaagatcttgtgggttggcccgctcctcaaggttcccgttctttggcaccctgcacctgcggctcctcggacctttatctggtcacgaggcacgccgatgtcttcccgtgcgccggcggggtgatagcaggggcagcctgctttcgccccggcccatttcctacttgaaaggctcctcggggggtccgctgttgtgccccgcggggcacgccgtgggcattttcagggcgcggtgtgcacccgtggagtggctaaggcagtggactttatccctgtagagaacctagagacaaccatgaggtccccggtgttcacggacaactcctctccaccagcagtaccccagagcttccaggtggcccacctgcatctcccacaggcagcggcaagagcaccaaggtcccagctgcatacgcagctcagggctataaggtgctagtgctcaacccctctgttgctgcaacactaggcttcggtgcttatatgtccaaggcccagggatcgaccctaacatcaggaccggggtgagaacaattaccactggcagccccatcacgtactccacctacggcaagttccttgccgacggcgggtgctcagggggtgcttatgacataataatctgtgacgagtgccacccacggatgccacgtccatcttaggcatcggcaccgtccttgaccaagcagagaccgcaggggcgaggcttgttgtgctcgccaccgctacccctccgggctccatcaccgtgccccatcctaacatgaggaggttgctctgtccaccaccggagagatccccttttatggcaaggctatccccctcgaagtaatcaagggggggaggcatctcatcttctgtcattcaaagaagaagtgtgacgagctcgctgcaaagctggttgcatgggcgtcaatgccgtggcctattaccgcggtcttgacgtgtctgtcatcccgaccagcggcgatgttgtcgtcgtggcaactgatgctctcatgaccggctataccggcgacttcgactcggtgatgactgcaacacgtgtgtcacccagacagtcgatttcagccttgaccccaccttcaccattgagacaaccacgcttccccaggatgctgtctcccgtacacaacggcggggcaggactggcagggggaagccaggcacctacggtttgtggcaccgggggagcgcccctctggcatgttcgactcgtctgtcctctgtgagtgctatgacgcgggctgtgcttggtatgagctcacgcccgccgagaccacagttaggctacgagcgtaatgaacaccccggggcttcccgtgtgccaggaccaccttgaattttgggagggcgtctttacgggccttacccatatagatgcccacttcctatcccagacaaagcagagtggggagaaccttccttacctggtagcgtacaagccaccgtgtgcgctagggctcaagcccctcccccatcgtgggaccagatgtggaagtgtttagtccgcctcaagcccaccctccatgggccaacacccctgctatacagattgggcgctgttcaaatgaagtcaccctgacacacccaatcacaaaatacatcatgacatgtatgtcggctga

SEQ ID NO: 383 - DNA, 4869 bp, Hepatitis C virus
tcgcccacaggacgtcaagttcccgggtggcggtcagatcgttggtggagtttacttgttgccgcgcaggggccctagattgggtgtgcgcgcgacgaggaagacttccgagcggtcgcaacctcgagtagacgtcagcctatccccaaggcacgtcggcccgagggcaggacctgggctcagcccgggtacccctggcccctctatggcaatgagggctgcgggtgggcgggatggctcctgtctccccgtggtctcggcctaactggggccccacagacccccggcgtaggtcgcgtaatttgggtaaggtcatcgatacccttacatgcggcttcgccgacctcatggggtacataccgctcgtcggcgcccctcttgggggcgctgccaggccctggcgcatggcgtccgggttctggaagacggcgtgaactatgcaacagggaaccttcctggttgctctttctctatcttccttctggctttgctctcttgcctgactgtgcctgcttcagcctacaagtgcgcaactccacggggctttatcatgtcaccaatgattgccctaactcgagtattgtgtacgaggcggacgatgctatcctgcacactccggggtgtgtcccttgcgtccgcgagggtaacggctcgaggtgttggtggcgataacccccacggtggccaccagggacggcaaactccccacagtgcagcttcgacgtcacatcgatctgctcgtcgggagcgctaccctttgttcggccctttacgtgggggacctgtgcggtctgtctttcttgtcggccaactgttcaccttctctcccaggcgccactggacaacgcaggactgcaattgttccatctatcccggccatataacgggtcaccgtatggcatgggacatgatgatgaactggtcccctacgcggcgctggtagtagctcagatgctccggatcccacaagccatcctggacatgatcgctggtgctcactggggagtcctggcgggcatagcgtatttctccatggtggggaactgggcgaaggtcctgtagtgctgctgctatttgccggcgtcgacgcgggaacccacgtcaccgggggcattgccgcccgtaccacgtctagaattgctggtctcttcaacccaggcgcccagcaggacatccagctggttaacaccaacggcagtggcacatcaacagaacggccttgaactgtaacgatagccttcacaccggctggatagcggggcttttctatcgctacaaattcaactcttcaggctgtcccgagaggttggccagctgccgacccctaccgattttgcccagggctggggccctattagttacgccaacggaagcggccccgaccaacgcccctactgctggcactatcccccaaagccttgcggcattgtgcccgcacagagcgtgtgtggcccggtgtattgcttcctcccagccccgtggtggtgggaacgaccgacaaggcgggcgcgcctacctacagatggggtgcaaacgatacggacgtcttcgtccttaacaacaccaggccaccactgggcaattggttcggttgacctggatgaactcaactggatacaccaaagtgtgcggggcgcccccctgcgtcatcggaggggtgggcaacaagaccttggactgccccaccgattgtttccgcaagcatccggaagccacatactctcggtgcggctccgtccctggattacacccaggtgtctggtcgactatccgtataggctttggcattacccttgtaccatcaactacaccgtgttcaaagtcaggatgtacgtgggaggggtcgagcataggctggaggcgcctgcaactggacgcggggcgaacgttgcaatctggaagacagggacaggtccgagctcagcccgttgctgctgtccaccacacagtggcaagtccttccgtgttccttcacgaccctgccagccttgtccaccggcctctccacctccaccagaacattgtggacgtgcagtacttatacggggtggggtcaagcatcgcgtcctgggccatcaagtgggagtacgtcgttctcctattccttctgctcgcagacgcgcgcgtctgtcctgcttgtggatgatgttactcatatcccaagcggaggcggctttggagaacctcgtagtgctcaatgcagcatctttggccgggacacacggtcttgtgtccctcctcgtgttcttctgctttgcgtggtacctgaaggtaggtgggtgcccggagcggtctacgccctctacgggatgtggcctctcctcctgctcctatcggcgttgccccagcgggcatatgcgttggacacggaggtggccgcgtcgtgtggcggcgctgtcttgtcgggttgatggcgctgactctgtcaccatattacaagcgctatgtcagctggtgcttatggtggcttcagtactttctgaccagagcagaagcgcaactgcacgtgtgggttccccctctcgacgtccgagggggggcgacgccgtcatcttactcatgtgtgctgtacgcccggctttggtgtttgacatcaccaagctgctgctggccgtcctcggacccctctggattctccaagccagtttgcttaaagtgccctacttgtgcgcgttcaaggccttctccggatctgcgcgctagcgcggaagatggcggggggtcattacgtgcaaatggtcatcatcaagttgggggcgctcactggcacttatgtgtataaccatctcactcctcttcgggactggcgcacaacggcctgcgagatctggctgtggctgtagagccagtcgtcttctcccgaatggagaccaacctcatcacgtggggggcagacaccgccgcatgcggcgacatcatcaacggcttgcccgttccgcccgcaggggccgggagatactgctcggaccagccgacggaatggtctccaaggggtggaggttgctggcacccatcacggcatacgcccagcagacaaggggcctcctagggtgtataatcaccagcctaaccggcgggacaaaaatcaggtggagggtgaggtccagattgtgtcaactgctgcccaaacctttctggcaacgtgcatcaatggagtatgctggaccgtctaccacggggccggaacgaggaccatcgcatccccaagggtcctgttatccagatgtacaccaatgtagataaagatctcgtgggttggcccgctcctcaaggttcccgttctttggcaccctgcacctgcggctcctcggacctttatctggtcacgaggcacgccgatgtcttcccgtgcgccggcggggtgatagcaggggcagcctgctttcgccccggcccatttcctacttgaaaggctcctcggggggtccgctgttgtgccccgcggggcacgccgtgggcattttcagggcgcggtgtgcacccgtggagtggctaaggcagtggactttatccctgtagagaacctagagacaaccatgaggtccccggtgttcacggacaactcctctccaccagcagtaccccagagcttccaggtggcccacctgcatctcccacaggcagcggcaagagcaccaaggtcccagctgcatacgcagctcagggctataaggtgctagtgctcaacccctctgttgctgcaacactaggcttcggtgcttatatgtccaaggcccagggatcgaccctaacatcaggaccggggtgagaacaattaccactggcagccccatcacgtactccacctacggcaagttccttgccgacggcgggtgctcagggggtgcttatgacataataatctgtgacgagtgccacccacggatgccacgtccatcttaggcatcggcaccgtccttgaccaagcagagaccgcaggggcgaggcttgttgtgctcgccaccgctacccctccgggctccatcactgtgccccatcctaacatgaggaggttgctctgtccaccaccggagagatccccttttatggcaaggctatccccctcgaagtaatcaagggggggaggcatctcatcttctgtcattcaaagaagaagtgtgacgagctcgctgcaaagctggttgcatgggcgtcaatgccgtggcctattaccgcggtcttgacgtgtctgtcatcccgaccagcggcgatgttgtcgtcgtggcaactgatgctctcatgaccggctataccggcgacttcgactcggtgatgactgcaacacgtgtgtcacccagacagtcgatttcagccttgaccccaccttcaccattgagacaaccacgcttccccaggatgctgtctcccgtacacaacggcggggcaggactggcagggggaagccaggcacctacggtttgtggcaccgggggagcgcccctctggcatgttcgactcgtctgtcctctgtgagtgctatgacgcgggctgtgcttggtatgagctcacgcccgccgagaccacagttaggctacgagcgtaatgaacaccccggggcttcccgtgtgccaggaccaccttgaattttgggagggcgtctttacgggccttacccatatagatgcccacttcctatcccagacaaagcagagtggggagaaccttccttacctggtagcgtacaagccaccgtgtgcgctagggctcaagcccctcccccgtcgtgggaccagatgtggaagtgtttagtccgcctcaagcccaccctccatgggccaacacccctgctatacagattgggcgctgttcaaatgaagtcaccctgacacacccaatcacaaaatacatcatgacatgtatgtcggctga

SEQ ID NO: 384 - DNA, 4869 bp, Hepatitis C virus
tcgcccacaggacgtcaagttcccgggtggcggtcagatcgttggtggagtttacttgttgccgcgcaggggccctagattgggtgtgcgcgcgacgaggaagacttccgagcggtcgcaacctcgagtagacgtcagcctatccccaaggcacgtcggcccgagggcaggacctgggctcagcccgggtacccctggcccctctatggcaatgagggctgcgggtgggcgggatggctcctgtctccccgtggtctcggcctaactggggccccacagacccccggcgtaggtcgcgtaatttgggtaaggtcatcgatacccttacatgcggcttcgccgacctcatggggtacataccgctcgtcggcgcccctcttgggggcgctgccaggccctggcgcatggcgtccgggttctggaagacggcgtgaactatgcaacagggaaccttcctggttgctctttctctatcttccttctggctttgctctcttgcctgactgtgcctgcttcagcctacaagtgcgcaactccacggggctttatcatgtcaccaatgattgccctaactcgagtattgtgtacgaggcggacgatgctatcctgcacactccggggtgtgtcccttgcgtccgcgagggtaacggctcgaggtgttggtggcgataacccccacggtggccaccagggacggcaaactccccacagtgcagcttcgacgtcacatcgatctgctcgtcgggagcgctaccctttgttcggccctttacgtgggggacctgtgcggtctgtctttcttgtcggccaactgttcaccttctctcccaggcgccactggacaacgcaggactgcaattgttccatctatcccggccatataacgggtcaccgtatggcatgggacatgatgatgaactggtcccctacgcggcgctggtagtagctcagatgctccggatcccacaagccatcctggacatgatcgctggtgctcactggggagtcctggcgggcatagcgtatttctccatggtggggaactgggcgaaggtcctgtagtgctgctgctatttgccggcgtcgacgcgggaacccacgtcaccgggggcattgccgcccgtaccacgtctagaattgctggtctcttcaacccaggcgcccagcaggacatccagctggttaacaccaacggcagtggcacatcaacagaacggccttgaactgtaacgatagccttcacaccggctggatagcggggcttttctatcgctacaaattcaactcttcaggctgtcccgagaggttggccagctgccgacccctaccgattttgcccagggctggggccctattagttacgccaacggaagcggccccgaccaacgcccctactgctggcactatcccccaaagccttgcggcattgtgcccgcacagagcgtgtgtggcccggtgtattgcttcctcccagccccgtggtggtgggaacgaccgacaaggcgggcgcgcctacctacagatggggtgcaaacgatacggacgtcttcgtccttaacaacaccaggccaccactgggcaattggttcggttgacctggatgaactcaactggatacaccaaagtgtgcggggcgcccccctgcgtcatcggaggggtgggcaacaagaccttgcactgccccaccgattgtttccgcaagcatccggaagccacatactctcggtgcggctccgtccctggattacacccaggtgtctggtcgactatccgtataggctttggcattacccttgtaccatcaactacaccgtgttcaaagtcaggatgtacgtgggaggggtcgagcataggctggaggcgcctgcaactggacgcggggcgaacgttgcaatctggaagacagggacaggtccgagctcagcccgttgctgctgtccaccacacagtggcaagtccttccgtgttccttcacgaccctgccagccttgtccaccggcctctccacctccaccagaacattgtggacgtgcagtacttatacggggtggggtcaagcatcgcgtcctgggccatcaagtgggagtacgtcgttctcctattccttctgctcgcagacgcgcgcgtctgtcctgcttgtggatgatgttactcatatcccaagcggaggcggctttggagaacctcgtagtgctcaatgcagcatctttggccgggacacacggtcttgtgtccctcctcgtgttcttctgctttgcgtggtacctgaaggtaggtgggtgcccggagcggtctacgccctctacgggatgtggcctctcctcctgctcctattggcgttgccccagcgggcatatgcgttggacacggaggtggccgcgtcgtgtggcggcgctgtcttgtcgggttgatggcgctgactctgtcaccatattacaagcgctatgtcagctggtgcttatggtggcttcagtactttctgaccagagcagaagcgcaactgcacgtgtgggttccccctctcgacgtccgagggggggcgacgccgtcatcttactcatgtgtgctgtacgcccggctttggtgtttgacatcaccaagctgctgctggccgtcctcggacccctctggattctccaagccagtttgcttaaagtgccctacttgtgcgcgttcaaggccttctccggatctgcgcgctagcgcggaagatggcggggggtcattacgtgcaaatggtcatcatcaagttgggggcgctcactggcacttatgtgtataaccatctcactcctcttcgggactggcgcacaacggcctgcgagatctggctgtggctgtagagccagtcgtcttctcccgaatggagaccaacctcatcacgtggggggcagacaccgccgcatgcggcgacatcatcaacggcttgcccgttccgcccgcaggggccgggagatactgctcggaccagccgacggaatggtctccaaggggtggaggttgctggcacccatcacggcatacgcccagcagacaaggggcctcctagggtgtataatcaccagcctaaccggcgggacaaaaatcaggtggagggtgaggtccagattgtgtcaactgctgcccaaacctttctggcaacgtgcatcaatggagtatgctggaccgtctaccacggggccggaacgaggaccatcgcatccccaagggtcctgttatccagatgtacaccaatgtagataaagatctcgtgggttggcccgctcctcaaggttcccgttctttggcaccctgcacctgcggctcctcggacctttatctggtcacgaggcacgccgatgtcttcccgtgcgccggcggggtgatagcaggggcagcctgctttcgccccggcccatttcctacttgaaaggctcctcggggggtccgctgttgtgccccgcggggcacgccgtgggcattttcagggcgcggtgtgcacccgtggagtggctaaggcagtggactttatccctgtagagaacctagagacaaccatgaggtccccggtgttcacggacaactcctctccaccagcagtaccccagagcttccaggtggcccacctgcatctcccacaggcagcggcaagagcaccaaggtcccagctgcatacgcagctcagggctataaggtgctagtgctcaacccctctgttgctgcaacactaggcttcggtgcttatatgtccaaggcccagggatcgaccctaacatcaggaccggggtgagaacaattaccactggcagccccatcacgtactccacctacggcaagttccttgccgacggcgggtgctcagggggtgcttatgacataataatctgtgacgagtgccacccacggatgccacgtccatcttaggcatcggcaccgtccttgaccaagcagagaccgcaggggcgaggcttgttgtgctcgccaccgctacccctccgggctccatcactgtgccccatcctaacatgaggaggttgctctgtccaccaccggagagatccccttttatggcaaggctatccccctcgaagtaatcaagggggggaggcatctcatcttctgtcattcaaagaagaagtgtgacgagctcgctgcaaagctggttgcatgggcgtcaatgccgtggcctattaccgcggtcttgacgtgtctgtcatcccgaccagcggcgatgttgtcgtcgtggcaactgatgctctcatgaccggctataccggcgacttcgactcggtgatgactgcaacacgtgtgtcacccagacagtcgatttcagccttgaccccaccttcaccattgagacaaccacgcttccccaggatgctgtctcccgtacacaacggcggggcaggactggcagggggaagccaggcacctacggtttgtggcaccgggggagcgcccctctggcatgttcgactcgtctgtcctctgtgagtgctatgacgcgggctgtgcttggtatgagctcacgcccgccgagaccacagttaggctacgagcgtaatgaacaccccggggcttcccgtgtgccaggaccaccttgaattttgggagggcgtctttacgggccttacccatatagatgcccacttcctatcccagacaaagcagagtggggagaaccttccttacctggtagcgtacaagccgccgtgtgcgctagggctcaagcccctcccccgtcgtgggaccagatgtggaagtgtttagtccgcctcaagcccaccctccatgggccaacacccctgctatacagattgggcgctgttcaaatgaagtcaccctgacacacccaatcacaaaatacatcatgacatgtatgtcggctga

SEQ ID NO: 385 - DNA, 4869 bp, Hepatitis C virus
tcgcccacaggacgtcaagttcccgggtggcggtcagatcgttggtggagtttacttgttgccgcgcaggggccctagattgggtgtgcgcgcgacgaggaagacttccgagcggtcgcaacctcgagcagacgtcagcctatccccaaggcacgtcggcccgagggcaggacctgggctcagcccgggtacccctggcccctctatggcaatgagggctgtgggtgggcgggatggctcctgtctccccgtggtctcggcctagctggggcccctcagacccccggcgtaggtcgcgtaatttgggtaaagtcatcgatacccttacatgcggcttcgccgacctcatggggtacataccgctcgtcggcgctcctcttgggggcgctgccaggccctggcgcatggcgtccgggttctggaagacggcgtgaactatgcaacagggaaccttcctggttgctctttctctatcttcctcctggctttgctctcttgcctgactgtgcctgcttcagcctacaagtgcgcaactccacggggctttatcatgtcaccaatgattgccctaactcgagtattgtgtacgaggcggccgatgctatcctgcacactccggggtgtgtcccttgcgtctacgagggtaacgcctcgaggtgttggtggcgataacccccacggtggccaccagggatggcaaactccccacagtccagcttcgacgtcacatcgatctgcttgtcgggagcgctaccctttgttcggccctttacgtgggggacctgtgcggtctgtctttcttgtcggccaactgttcaccttctctcccaggctccactggacaacgcaggactgcaattgttccatctaccccggccatataacgggtcaccgtatggcgtgggacatgatgatgaactggtcccctacgcggcgctggtagtagctcagatgctccggatcccgcaagccatcttggacatgatcgctggtgctcactggggagtcctagcgggcatagcgtatttctccatggtggggaactgggcgaaggtcctgtagtgctgctgctatttgccggcgtcgacgcggaaacccacgtcaccgggggagctgccggccgtaccatggctggatttactggtctctttacacaaggcgccaagcagagcatccagttggttaacaccaacggcagtggcacatcaacagaacggctttgaactgcaacgatagccttcagaccggctggatagcggggcttctctatcacaacaaattcaactcttcaggctgtcccgagaggttggccagctgccgacccctaccgattttgcccagggctggggccctatcagctacgccaacggaagcggccccgaccaacgcccctactgctggcactaccccccaaagccttgcggcattgtgcccgcacagagcgtatgtggcccggtatattgtttcctcctagccccgtggtggtgggaacgaccgacaggtcgggcgcgcctacctacggatggggtgcaaacgatacggacgtcttcgtccttaacaacaccaggccaccactgggcaattggttcggttgacctggatgaactcaactggatacaccaaagtgtgcggggcgcccccctgtgccatcagaggggtgggcaacaacaccttgcactgccccaccgattgtttccgcaagcatccggaagccacatactctcggtgcggctccgtccctggattacacccaggtgcctggtcaactacccgtataggctttggcattacccttgtaccatcaactacaccgtgttcaaggtcaggatgtacgtgggaggggtcgagcacaggctagaggcgcctgcaactggacgcggggcgaacgttgcagtctggaagacagggacaggtccgagctcagcccgttgctgctgtccaccacacagtggcaggtccttccctgttccttcacgaccctgccagccttgtccaccggcctctccacctccaccagaacattgtggacgtgcagtacttatacggggtggggtcaagtatcgcgtcctgggccatcaagtgggagtacgtcgttctcctattccttctgcttgcagacgcgcgcgtctgtcctgcttgtggatgatgttactcatatcccaagcggaggcggccttggagaacctcgtagtgctcaatgcagcatctttggccgggacgcatggtcttgtgtccttcctcgtgttcttctgctttgcgtggtacctgaaggtaggtgggtgcccggagcggcctacgccctctacgggatgtggcctctcctcctgctcctgttggcgttgccccagcgggcatacgcgttggacacggaggtggccgcgtcgtgtggcggcgctgtcttgtcgggttgatggcgctgactctgtcaccacattacaagcgatatgtcagctggtgcttgtggtggcttcagtactttctgaccagagcagaagcgcaactacacgtgtgggttccccccctcgacgtccgagggggggcgacgccgtcatcttactcatgtgtgctgtacgcccgactttggtgtttgacatcaccaagctgctgctggccgtcttcgggcccctttggattctccaggccagtttgcttaaagtaccctacttgtgcgcgttcaaggccttctccggatctgcgcgctagcgcggaagatggcggggggtcactacgtgcaaatggtcatcatcaaactaggggcgctcactggcacctatgtttataaccacctcactcctcttcgggactggcgcacaacggcctgcgagatctggctgtggctgtagagccagtcgtcttctcccgaatggagaccaacctcatcacgtggggggcagacaccgccgcgtgcggtgacatcatcaacggcttgcccgttccgcccgtaggggccgggagatactgctcggaccagccgacggaatggtctccaaggggtggaggttgctggcacccatcacggcatacgcccagcagacaaggggcctcctagggtgtataatcaccagcctaaccggcgggacaaaaaccaggtggagggtgaggtccagattgtgtcaactgctgcccaaactttcctggcaacgtgcatcaatggagtatgctggaccgtctaccacggggccgggacgaggaccatcgcatccccaagggtcctgtcatccagatgtacaccaatgtagacaaagatcttgtgggctggcccgctccccaaggttcccgttcattgacaccctgcacctgtggctcctcggacctttatctggtcacgaggcacgccgatgtcttcccgtgcgccggcggggtgatagcaggggcagcctgctttcgccccggcccatttcctacttgaaaggctcctcggggggtccgctgttgtgccccgcggggcatgctgtgggcatattcagggcgcagtgtgcacccgtggagtggctaaggcggtggactttatccctgtagagaacctagagacaaccatgaggtccccggtgttcacggacaactcctctccaccggcagtaccccagagcttccaggtggcccacctgcatctcccacaggcagcggcaagagcaccaaggtcccggctgcatatgcagctcagggctataaggtgctagtgctcaacccctctgttgctgcaacactgggcttcggtgtttatatgtccaaggcccagggatcgatcctaacatcaggaccggggtgagaacaattaccactggcagccccatcacgtactccacctacggcaagttccttgccgacggcgggtgctcagggggtgcttatgacataataatctgtgacgagtgccacccacggatgccacatctatcttaggcatcggcaccgtccttgaccaagcagagaccgcgggggcgaggcttgttgtgctcgccaccgctactcctccgggctccgtcaccgtgccccatcctaacatgaggaggttgctctgtccaccaccggagagatccctttttatggcaaggctatccccctcgaagtaatcaagggggggaggcatctcatcttctgtcattcaaagaagaagtgtgacgagctcgccgcaaagctggttgcatgggcgtcaatgccgtggcctattaccgcggccttgacgtgtctgtcatcccgaccagcggcgatgttgtcgtcgtggcaactgatgctctcatgaccggctataccggcgacttcgactcggtgatgactgcaatacgtgtgtcacccagacagttgatttcagccttgaccccaccttcaccattgagacaaccacgcttccccaggatgctgtctcccgtacacaacgtcggggcaggactggcagggggaagccaggcacctacgatttgtggcaccgggggagcgcccctccggcatgttcgactcgtctgtcctctgtgagtgctatgacgcgggctgtgcttggtatgagctcacgcccgccgagactacagttaggctacgagcgtaatgaacaccccggggcttcccgtgtgccaggaccaccttgaattttgggagggcgtctttacgggccttactcatatagatgcccacttcctatcccagacaaagcagagtggggagaaccttccttacctggtagcgtacaagccaccgtgtgcgctagggctcaagcccctcccccatcgtgggaccagatgtggaagtgcttggtccgcctcaagcccaccctccatgggccaacacccctgctatacagattgggcgctgttcaaatgaagtcaccctgacacacccaatcacaaaatacatcatgacatgtatgtcggctga

SEQ ID NO: 386 - DNA, 4869 bp, Hepatitis C virus
tcgcccacaggacgtcaagttcccgggtggcggtcagatcgttggtggagtttacttgttgccgcgcaggggccctagattgggtgtgcgcgcgacgaggaagacttccgagcggtcgcaacctcgagtagacgtcagcctatccccaaggcacgtcggcccgagggcaggacctgggctcagcccgggtacccctggcccctctatggcaatgagggctgcgggtgggcgggatggctcctgtctccccgtggtctcggcctaactggggccccacagacccccggcgtaggtcgcgtaatttgggtaaggtcatcgatacccttacatgcggcttcgccgacctcatggggtacataccgctcgtcggcgcccctcttgggggcgctgccaggccctggcgcatggcgtccgggttctggaagacggcgtgaactatgcaacagggaaccttcctggttgctctttctctatcttccttctggctttgctctcttgcctgactgtgcctgtttcagcctacaagtgcgcaactccacggggctttatcatgtcaccaatgattgccctaattcgagtattgtgtacgaggcggacgatgctatcctgcacactccggggtgtgtcccttgcgtccgcgagggtaacggctcgaggtgttggtggcgatagcccccacggtggccaccagggacggcaaactccccacagtgcagcttcgacgtcacatcgatctgcttgtcgggagcgctaccctttgttcggccctttacgtgggggacctgtgcggtctgtctttcttgtcggccaactgttcaccttctctcccaggcgccactggacaacgcaggactgcaattgttccatctatcccggccatataacgggtcaccgtatggcatgggacatgatgatgaactggtcccctacgcggcgctggtagtagctcagatgctccggatcccacaagccatcctggacatgatcgctggtgctcactggggagtcctggcgggcatagcgtatttctccatggtggggaactgggcgaaggtcctgtagtgctgctgctatttgccggcgtcgacgcgggaacccacgtcaccgggggcattgccgcccgtaccacgtctagaattgctggtctcttcaacccaggcgcccagcaggacatccagctggttaacaccaacggcagtggcacatcaacagaacggccttgaactgtaacgatagccttcacaccggctggatagcggggcttttctatcgctacaaattcaactcttcaggctgtcccgagaggttggccagctgccgacccctaccgattttgcccagggctggggccctattagttacgccaacggaagcggccccgaccaacgcccctactgctggcactatcccccaaagccttgcggcattgtgcccgcacagagcgtgtgtggcccggtgtattgcttcctcccagccccgtggtggtgggaacgaccgacaaggcgggcgcgcctacctacagatggggtgcaaacgatacggacgtcttcgtccttaacaacaccaggccaccactgggcaattggttcggttgacctggatgaactcaactggatacaccaaagtgtgcggggcgcccccctgcgtcatcggaggggtgggcaacaagaccttgcactgccccaccgattgtttccgcaagcatccggaagccacatactctcggtgcggctccgtccctggattacacccaggtgcctggtcgactatccgtataggctttggcattacccttgtaccatcaactacaccgtgttcaaagtcaggatgtacgtgggaggggtcgagcataggctagaggcgcctgcaactggacgcggggcgaacgttgcaatctggaagacagggacaggtccgagctcagcccgttgctgctgtccaccacacagtggcaagtccttccgtgttccttcacgaccctgccagccttgtccaccggcctctccacctccaccagaacattgtggacgtgcagtacttatacggggtggggtcaagcatcgcgtcctgggccatcaagtgggagtacgtcgttctcctattccttctgctcgcagacgcgcgcgtctgtcctgcttgtggatgatgttactcatatcccaagcggaggcggctttggagaacctcgtagtgctcaatgcagcatctttggccgggacacacggtcttgtgtccctcctcgtgttcttctgctttgcgtggtacctgaaggtaggtgggtgcccggagcggtctacgccctctacgggatgtggcccctcctcctgctcctattggcgttgccccagcgggcatatgcgttggacacggaggtggccgcgtcgtgtggcggcgctgtcttgtcgggttgatggcgctgactctgtcaccatattacaagcgctatgtcagctggtgcttatggtggcttcagtactttctgaccagagcagaagcgcaactgcacgtgtgggttccccctctcgacgtccgagggggggcgacgccgtcatcttactcatgtgtgctgtacgcccgactttggtgtttgacatcaccaagctgctgctggccgtcctcggacccctctggattctccaagccagtttgcttaaagtgccctacttgtgcgcgttcaaggccttctccggatctgcgcgctagcgcggaagatggcggggggtcattacgtgcaaatggtcatcatcaagttgggggcgctcactggcacttatgtgtataaccatctcactcctcttcgggactggcgcacaacggcctgcgagatctggctgtggctgtagagccagtcgtcttctcccgaatggagaccaacctcatcacgtggggggcagacaccgccgcatgcggcgacatcatcaacggcttgcccgttccgcccgcaggggccgggagatactgctcggaccagccgacggaatggtctccaaggggtggaggttgctggcacccatcacggcgtacgcccagcagacaaggggcctcctagggtgtataatcaccagcctaaccggcgggacaaaaatcaggtggagggtgaggtccagattgtgtcaactgctgcccaaacctttctggcaacgtgcatcaatggagtatgctggaccgtctaccacggggccggaacgaggaccatcgcatccccaagggtccggttatccagatgtacaccaatgtagacaaagatcttgtgggttggcccgctcctcaaggttcccgttctttggcaccctgcacctgcggctcctcggacctttatctggtcacgaggcacgccgatgtcttcccgtgcgccggcggggtgatagcaggggcagcctgctttcgccccggcccatttcctacttgaaaggctcctcggggggtccgctgttgtgccccgcggggcacgccgtgggcattttcagggcgcggtgtgcacccgtggagtggctaaggcagtggactttatccctgtagagaacctagagacaaccatgaggtccccggtgttcacggacaactcctctccaccagcagtaccccagagcttccaggtggcccacctgcatctcccacaggcagcggcaagagcaccaaggtcccagctgcatacgcagctcagggctataaggtgctagtgctcaacccctctgttgctgcaacactaggcttcggtgcttatatgtccaaggcccagggatcgaccctaacatcaggaccggggtgagaacaattaccactggcggccccatcacgtactccacctacggcaagttccttgccgacggcgggtgctcagggggtgcttatgacataataatctgtgacgagtgccacccacggatgccacgtccatcttaggcatcggcaccgtccttgaccaagcagagaccgcaggggcgaggcttgttgtgctcgccaccgctacccctccgggctccatcaccgtgccccatcctaacatgaggaggttgctctgtccaccaccggagagatccccttttatggcaaggctatccccctcgaagtaatcaagggggggaggcatctcatcttctgtcattcaaagaagaagtgtgacgagctcgctgcaaagctggttgcatgggcgtcaatgccgtggcctattaccgcggtcttgacgtgtctgtcatcccgaccagcggcgatgttgtcgtcgtggcaactgatgctctcatgaccggctataccggcgacttcgactcggtgatgactgcaacacgtgtgtcacccagacagtcgatttcagccttgaccccaccttcaccattgagacaaccacgcttccccaggatgctgtctcccgtacacaacggcggggcaggactggcagggggaagccaggcacctacggtttgtggcaccgggggagcgcccctctggcatgttcgactcgtctgtcctctgtgagtgctatgacgcgggctgtgcttggtatgagctcacgcccgccgagaccacagttaggctacgagcgtaatgaacaccccggggcttcccgtgtgccaggaccaccttgaattttgggagggcgtctttacgggccttacccatatagatgcccacttcctatcccagacaaagcagagtggggagaaccttccttacctggtagcgtacaagccaccgtgtgcgctagggctcaagcccctcccccatcgtgggaccagatgtggaagtgtttagtccgcctcaagcccaccctccatgggccaacacccctgctatacagattgggcgctgttcaaatgaagtcaccctgacacacccaatcacaaaatacatcatgacatgtatgtcggctga

SEQ ID NO: 387 - DNA, 4869 bp, Hepatitis C virus; identical to SEQ ID NO: 194

SEQ ID NO: 388 - DNA, 4869 bp, Hepatitis C virus
tcgcccacaggacgtcaagttcccgggtggcggtcagatcgttggtggagtttacttgttgccgcgcaggggccctagattgggtgtgcgcgcgacgaggaagacttccgagcggtcgcaacctcgagtagacgtcagcctatccccaaggcacgtcggcccgagggcaggacctgggctcagcccgggtacccctggcccctctatggcaatgagggctgcgggtgggcgggatggctcctgtctccccgtggtctcggcctaactggggccccacagacccccggcgtaggtcgcgtaatttgggtaaggtcatcgatacccttacatgcggcttcgccgacctcatggggtacataccgctcgtcggcgcccctcttgggggcgctgccaggccctggcgcatggcgtccgggttctggaagacggcgtgaactatgcaacagggaaccttcctggttgctctttctctatcttccttctggctttgctctcttgcctgactgtgcctgcttcagcctacaagtgcgcaactccacggggctttatcatgtcaccaatgattgccctaactcgagtattgtgtacgaggcggacgatgctatcctgcacactccggggtgtgtcccttgcgtccgcgagggtaacggctcgaggtgttggtggcgataacccccacggtggccaccagggacggcaaactccccacagtgcagcttcgacgtcacatcgatctgctcgtcgggagcgctaccctttgttcggccctttacgtgggggacctgtgcggtctgtctttcttgtcggccaactgttcaccttctctcccaggcgccactggacaacgcaggactgcaattgttccatctatcccggccatataacgggtcaccgtatggcatgggacatgatgatgaactggtcccctacgcggcgctggtagtagctcagatgctccggatcccacaagccatcctggacatgatcgctggtgctcactggggagtcctggcgggcatagcgtatttctccatggtggggaactgggcgaaggtcctgtagtgctgctgctatttgccggcgtcgacgcgggaacccacgtcaccgggggcattgccgcccgtaccacgtctagaattgctggtctcttcaacccaggcgcccagcaggacatccagctggttaacaccaacggcagtggcacatcaacagaacggccttgaactgtaacgatagccttcacaccggctggatagcggggcttttctatcgctacaaattcaactcttcaggctgtcccgagaggttggccagctgccgacccctaccgattttgcccagggctggggccctattagttacgccaacggaagcggccccgaccaacgcccctactgctggcactatcccccaaagccttgcggcattgtgcccgcacagagcgtgtgtggcccggtgtattgcttcctcccagccccgtggtggtgggaacgaccgacaaggcgggcgcgcctacctacagatggggtgcaaacgatacggacgtcttcgtccttaacaacaccaggccaccactgggcaattggttcggttgacctggatgaactcaactggatacaccaaagtgtgcggggcgcccccctgcgtcatcggaggggtgggcaacaagaccttgcactgccccaccgattgtttccgcaagcatccggaagccacatactctcggtgcggctccgtccctggattacacccaggtgtctggtcgactatccgtataggctttggcattacccttgtaccatcaactacaccgtgttcaaagtcaggatgtacgtgggaggggtcgagcataggctggaggcgcctgcaactggacgcggggcgaacgttgcaatctggaagacagggacaggtccgagctcagcccgttgctgctgtccaccacacagtggcaagtccttccgtgttccttcacgaccctgccagccttgtccaccggcctctccacctccaccagaacattgtggacgtgcagtacttatacggggtggggtcaagcatcgcgtcctgggccatcaagtgggagtacgtcgttctcctattccttctgctcgcagacgcgcgcgtctgtcctgcttgtggatgatgttactcatatcccaagcggaggcggctttggagaacctcgtagtgctcaatgcagcatctttggccgggacacacggtcttgtgtccctcctcgtgttcttctgctttgcgtggtacctgaaggtaggtgggtgcccggagcggtctacgccctctacgggatgtggcctctcctcctgctcctattggcgttgccccagcgggcatatgcgttggacacggaggtggccgcgtcgtgtggcggcgctgtcttgtcgggttgatggcgctgactctgtcaccatattacaagcgctatgtcagctggtgcttatggtggcttcagtactttctgaccagagcagaagcgcaactgcacgtgtgggttccccctctcgacgtccgagggggggcgacgccgtcatcttactcatgtgtgctgtacgcccggccttggtgtttgacatcaccaagctgctgctggccgtcctcggacccctctggattctccaagccagtttgcttaaagtgccctacttgtgcgcgttcaaggccttctccggatctgcgcgctagcgcggaagatggcggggggtcattacgtgcaaatggtcatcatcaagttgggggcgctcactggcacttatgtgtataaccatctcactcctcttcgggactggcgcacaacggcctgcgagatctggctgtggctgtagagccagtcgtcttctcccgaatggagaccaacctcatcacgtggggggcagacaccgccgcatgcggcgacatcatcaacggcttgcccgttccgcccgcaggggccgggagatactgctcggaccagccgacggaatggtctccaaggggtggaggttgctggcacccatcacggcatacgcccagcagacaaggggcctcctagggtgtataatcaccagcctaaccggcgggacaaaaatcaggtggagggtgaggtccagattgtgtcaactgctgcccaaacctttctggcaacgtgcatcaatggagtatgctggaccgtctaccacggggccggaacgaggaccatcgcatccccaagggtcctgttatccagatgtacaccaatgtagataaagatctcgtgggttggcccgctcctcaaggttcccgttctttggcaccctgcacctgcggctcctcggacctttatctggtcacgaggcacgccgatgtcttcccgtgcgccggcggggtgatagcaggggcagcctgctttcgccccggcccatttcctacttgaaaggctcctcggggggtccgctgttgtgccccgcggggcacgccgtgggcattttcagggcgcggtgtgcacccgtggagtggctaaggcagtggactttatccctgtagagaacctagagacaaccatgaggtccccggtgttcacggacaactcctctccaccagcagtaccccagagcttccaggtggcccacctgcatctcccacaggcagcggcaagagcaccaaggtcccagctgcatacgcagctcagggctataaggtgctagtgctcaacccctctgttgctgcaacactaggcttcggtgcttatatgtccaaggcccagggatcgaccctaacatcaggaccggggtgagaacaattaccactggcagccccatcacgtactccacctacggcaagttccttgccgacggcgggtgctcagggggtgcttatgacataataatctgtgacgagtgccacccacggatgccacgtccatcttaggcatcggcaccgtccttgaccaagcagagaccgcaggggcgaggcttgttgtgctcgccaccgctacccctccgggctccatcactgtgccccatcctaacatgaggaggttgctctgtccaccaccggagagatccccttttatggcaaggctatccccctcgaagtaatcaagggggggaggcatctcatcttctgtcattcaaagaagaagtgtgacgagctcgctgcaaagctggttgcatgggcgtcaatgccgtggcctattaccgcggtcttgacgtgtctgtcatcccgaccagcggcgatgttgtcgtcgtggcaactgatgctctcatgaccggctataccggcgacttcgactcggtgatgactgcaacacgtgtgtcacccagacagtcgatttcagccttgaccccaccttcaccattgagacaaccacgcttccccaggatgctgtctcccgtacacaacggcggggcaggactggcagggggaagccaggcacctacggtttgtggcaccgggggagcgcccctctggcatgttcgactcgtctgtcctctgtgagtgctatgacgcgggctgtgcttggtatgagctcacgcccgccgagaccacagttaggctacgagcgtaatgaacaccccggggcttcccgtgtgccaggaccaccttgaattttgggagggcgtctttacgggccttacccatatagatgcccacttcctatcccagacaaagcagagtggggagaaccttccttacctggtagcgtacaagccaccgtgtgcgctagggctcaagcccctcccccgtcgtgggaccagatgtggaagtgtttagtccgcctcaagcccaccctccatgggccaacacccctgctatacagattgggcgctgttcaaatgaagtcaccctgacacacccaatcacaaaatacatcatgacatgtatgtcggctga

SEQ ID NO: 389 - DNA, 4869 bp, Hepatitis C virus; identical to SEQ ID NO: 209

SEQ ID NO: 390 - DNA, 4869 bp, Hepatitis C virus
tcgcccacaggacgtcaagttcccgggtggcggtcagatcgttggtggagtttacttgttgccgcgcaggggccctagattgggtgtgcgcgcgacgaggaagacttccgagcggtcgcaacctcgagtagacgtcagcctatccccaaggcacgtcggcccgagggcaggacctgggctcagcccgggtacccctggcccctctatggcaatgagggctgcgggtgggcgggatggctcctgtctccccgtggtctcggcctaactggggccccacagacccccggcgtaggtcgcgtaatttgggtaaggtcatcgatacccttacatgcggcttcgccgacctcatggggtacataccgctcgtcggcgcccctcttgggggcgctgccaggccctggcgcatggcgtccgggttctggaagacggcgtgaactatgcaacagggaaccttcctggttgctctttctctatcttccttctggctttgctctcttgcctgactgtgcctgcttcagcctacaagtgcgcgactccacggggctttatcatgtcaccaatgattgccctaactcgagtattgtgtacgaggcggacgatgctgtcctgcacactccggggtgtgtcccttgcgtccgcgagggtaacggctcgaggtgttggtggcgataacccccacggtggccaccagggacggcaaactccccacagtgcagcttcgacgtcacatcgatctgctcgtcgggagcgctaccctttgttcggccctttacgtgggggacctgtgcggtctgtctttcttgtcggccaactgttcaccttctctcccaggcgccactggacaacgcaggactgcaattgttccatctatcccggccatataacgggtcaccgtatggcatgggacatgatgatgaactggtcccctacgcggcgctggtagtagctcagatgctccggatcccacaagccatcctggacatgatcgctggtgctcactggggagtcctggcgggcatagcgtatttctccatggtggggaactgggcgaaggtcctgtagtgctgctgctatttgccggcgtcgacgcgggaacccacgtcaccgggggcattgccgcccgtaccacgtctagaattgctggtctcttcaacccaggcgcccagcaggacatccagctggttaacaccaacggcagtggcacatcaacagaacggccttgaactgtaacgatagccttcacaccggctggatagcggggcttttctatcgctacaaattcaactcttcaggctgtcccgagaggttggccagctgccgacccctaccgattttgcccagggctggggccctattagttacgccaacggaagcggccccgaccaacgcccctactgctggcactatcccccaaagccttgcggcattgtgcccgcacagagcgtgtgtggcccggtgtattgcttcctcccagccccgtggtggtgggaacgaccgacaaggcgggcgcgcctacctacagatggggtgcaaacgatacggacgtcttcgtccttaacaacaccaggccaccactgggcaattggttcggttgacctggatgaactcaactggatacaccaaagtgtgcggggcgcccccctgcgtcatcggaggggtgggcaacaagaccttgcactgccccaccgattgtttccgcaagcatccggaagccacatactctcggtgcggctccgtccctggattacacccaggtgtctggtcgactatccgtataggctttggcattacccttgtaccatcaactacaccgtgttcaaagtcaggatgtacgtgggaggggtcgagcataggctggaggcgcctgcaactggacgcggggcgaacgttgcaatctggaagacagggacaggtccgagctcagcccgttgctgctgtccaccacacagtggcaagtccttccgtgttccttcacgaccctgccagccttgtccaccggcctctccacctccaccagaacattgtggacgtgcagtacttatacggggtggggtcaagcatcgcgtcctgggccatcaagtgggagtacgtcgttctcctattccttctgctcgcagacgcgcgcgtctgtcctgcttgtggatgatgttactcatatcccaagcggaggcggctttggagaacctcgtagtgctcaatgcagcatctttggccgggacacacggtcttgtgtccctcctcgtgttcttctgctttgcgtggtacctgaaggtaggtgggtgcccggagcggtctacgccctctacgggatgtggcctctcctcctgctcctattggcgttgccccagcgggcatatgcgttggacacggaggtggccgcgtcgtgtggcggcgctgtcttgtcgggttgatggcgctgactctgtcaccatattacaagcgctatgtcagctggtgcttatggtggcttcagtactttctgaccagagcagaagcgcaactgcacgtgtgggttccccctctcgacgtccgagggggggcgacgccgtcatcttactcatgtgtgctgtacgcccggctttggtgtttgacatcaccaagctgctgctggccgtcctcggacccctctggattctccaagccagtttgcttaaagtgccctacttgtgcgcgttcaaggccttctccggatctgcgcgctagcgcggaagatggcggggggtcattacgtgcaaatggtcatcatcaagttgggggcgctcactggcacttatgtgtataaccatctcactcctcttcgggactggcgcacaacggcctgcgagatctggctgtggctgtagagccagtcgtcttctcccgaatggagaccaacctcatcacgtggggggcagacaccgccgcatgcggcgacatcatcaacggcttgcccgttccgcccgcaggggccgggagatactgctcggaccagccgacggaatggtctccaaggggtggaggttgctggcacccatcacggcatacgcccagcagacaaggggcctcctagggtgtataatcaccagcctaaccggcgggacaaaaatcaggtggagggtgaggtccagattgtgtcaactgctgcccaaacctttctggcaacgtgcatcaatggagtatgctggaccgtctaccacggggccggaacgaggaccatcgcatccccaagggtcctgttatccagatgtacaccaatgtagataaagatctcgtgggttggcccgctcctcaaggttcccgttctttggcaccctgcacctgcggctcctcggacctttatctggtcacgaggcacgccgatgtcttcccgtgcgccggcggggtgatagcaggggcagcctgctttcgccccggcccatttcctacttgaaaggctcctcggggggtccgctgttgtgccccgcggggcacgccgtgggcattttcagggcgcggtgtgcacccgtggagtggctaaggcagtggactttatccctgtagagaacctagagacaaccatgaggtccccggtgttcacggacaactcctctccaccagcagtaccccagagcttccaggtggcccacctgcatctcccacaggcagcggcaagagcaccaaggtcccagctgcatacgcagctcagggctataaggtgctagtgctcaacccctctgttgctgcaacactaggcttcggtgcttatatgtccaaggcccagggatcgaccctaacatcaggaccggggtgagaacaattaccactggcagccccatcacgtactccacctacggcaagttccttgccgacggcgggtgctcagggggtgcttatgacataataatctgtgacgagtgccacccacggatgccacgtccatcttaggcatcggcaccgtccttgaccaagcagagaccgcaggggcgaggcttgttgtgctcgccaccgctacccctccgggctccatcactgtgccccatcctaacatgaggaggttgctctgtccaccaccggagagatccccttttatggcaaggctatccccctcgaagtaatcaagggggggaggcatctcatcttctgtcattcaaagaagaagtgtgacgagctcgctgcaaagctggttgcatgggcgtcaatgccgtggcctattaccgcggtcttgacgtgtctgtcatcccgaccagcggcgatgttgtcgtcgtggcaactgatgctctcatgaccggctataccggcgacttcgactcggtgatgactgcaacacgtgtgtcacccagacagtcgatttcagccttgaccccaccttcaccattgagacaaccacgcttccccaggatgctgtctcccgtacacaacggcggggcaggactggcagggggaagccaggcacctacggtttgtggcaccgggggagcgcccctctggcatgttcgactcgtctgtcctctgtgagtgctatgacgcgggctgtgcttggtatgagctcacgcccgccgagaccacagttaggctacgagcgtaatgaacaccccggggcttcccgtgtgccaggaccaccttgaattttgggagggcgtctttacgggccttacccatatagatgcccacttcctatcccagacaaagcagagtggggagaaccttccttacctggtagcgtacaagccaccgtgtgcgctagggctcaagcccctcccccgtcgtgggaccagatgtggaagtgtttagtccgcctcaagcccaccctccatgggccaacacccctgctatacagattgggcgctgttcaaatgaagtcaccctgacacacccaatcacaaaatacatcatgacatgtatgtcggctga

SEQ ID NO: 391 - DNA, 4869 bp, Hepatitis C virus
tcgcccacaggacgtcaagttcccgggtggcggtcagatcgttggtggagtttacttgttgccgcgcaggggccctagattgggtgtgcgcgcgacgaggaagacttccgagcggtcgcaacctcgagcagacgtcagcctatccccaaggcacgtcggcccgagggcaggacctgggctcagcccgggtacccctggcccctctatggcaatgagggctgtgggtgggcgggatggctcctgtctccccgtggtctcggcctagctggggcccctcagacccccggcgtaggtcgcgtaatttgggtaaagtcatcgatacccttacatgcggcttcgccgacctcatggggtacataccgctcatcggcgctcctcttgggggcgctgccaggccctggcgcatggcgtccgggttctggaagacggcgtgaactatgcaacagggaaccttcctggttgctctttctctatcttcctcctggctttgctctcttgcctgactgtgcctgcttcagcctacaagtgcgcaactccacggggctttatcatgtcaccaatgattgccctaactcgagtattgtgtacgaggcggccgatgctatcctgcacactccggggtgtgtcccttgcgtctacgagggtaacgcctcgaggtgttggtggcgataacccccacggtggccaccagggatggcaaactccccacagtccagcttcgacgtcacatcgatctgcttgtcgggagcgctaccctttgttcggccctttacgtgggggacctgtgcggtctgtctttcttgtcggccaactattcaccttctctcccaggctccactggacaacgcaggactgcaattgttccatctaccccggccatataacgggtcaccgtatggcatgggacatgatgatgaactggtcccctacgcggcgctggtagtagctcagatgctccggatcccgcaagccatcttggacatgatcgctggtgctcactggggagtcctagcgggcatagcgtatttctccatggtggggaactgggcgaaggtcctgtagtgctgctgctatttgccggcgtcgacgcggaaacccacgtcaccgggggagctgccggccgtaccatggctggatttactggtctctttacacaaggcgccaagcagagcatccagttggttaacaccaacggcagtggcacatcaacagaacggctttgaactgcaacgatagccttcagaccggctggatagcggggcttctctatcacaacaaattcaactcttcaggctgtcccgagaggttggccagctgccgacccctaccgattttgcccagggctggggccctatcagttacgccaacggaagcgggcccgaccaacgcccctactgctggcactaccccccaaagccttgcggcattgtgcccgcacagagcgtatgtggcccggtatattgtttcctcctagccccgtggtggtgggaacgaccgacaggtcgggcgcgcctacctacggatggggtgcaaacgatacggacgtcttcgtccttaacaacaccaggccaccactgggcaattggttcggttgacctggatgaactcaactggatacaccaaagtgtgcggggcgcccccctgtgtcatcagaggggtgggcaataacaccttgcactgccccaccgattgtttccgcaagcatccggaaaccacatactctcggtgcggctccgtccctggattacacccaggtgcctggtcaactacccgtataggctttggcattacccttgtaccatcaactacaccgtgttcaaggtcaggatgtacgtgggaggggtcgagcataggctagaggcgcctgcaactggacgcggggcgaacgttgcagtctggaagacagggacaggtccgagctcagcccgttgctgctgtccaccacacagtggcaggtccttccctgttccttcacgaccctgccagccttgtccaccggcctctccacctccaccagaacattgtggacgtgcagtacttatacggggtggggtcaagtatcgcgtcctgggccatcaagtgggagtacgtcgttctcctattccttctgcttgcagacgcgcgcgtctgtcctgcttgtggatgatgttactcatatcccaagcggaggcggccttggagaacctcgtagtgctcaatgcagcatctttggccgggacgcatggtcttgtgtccttcctcgtgttcttctgctttgcgtggtacctgaaggtaggtgggtgcccggagcgacctacgccctctacgggatgtggcctctcctcctgctcctgttggcgttgccccagcgggcatacgcgttggacacggaggtggccgcgtcgtgtggcggcgctgtcttgtcgggttgatggcgctgactctgtcaccacattacaagcgatatgtcagctggtgcttgtggtggcttcagtactttctgaccagagcagaagcgcaactgcacgtgtgggttccccccctcgacgtccgagggggggcgacgccgtcatcttactcatgtgtgctgtacgcccgactttggtgtttgacatcaccaagctgctgctggccgtcttcgggcccctttggattctccaagccagtttgcttaaagtaccctacttgtgcgcgttcaaggccttctccggatctgcgcgctagcgcggaagatggcggggggtcattacgtgcaaatggtcatcatcaaactaggggcgctcactggcacctatgtttataaccacctcactcctcttcgggactggcgcacaacggcctgcgagatctggctgtggctgtagagccagtcgtcttctcccgaatggagaccaacctcatcacgtggggggcagacaccgccgcgtgcggtgacatcatcaacggcttgcccgttccgcccgtaggggccgggagatactgctcggaccagccgacggaatggtctccaaggggtggaggttgctggcacccatcacggcatacgcccagcagacaaggggcctcctagggtgtataatcaccagcctaaccggcgggacaaaaaccaggtggagggtgaggtccagattgtgtcaactgctgcccaaactttcctggcaacgtgcatcaacggagtatgctggaccgtctaccacggggccgggacgaggaccatcgcatccccaagggtcctgtcatccagatgtacaccaatgtagacaaagatcttgtgggctggcccgctccccaaggctcccgttcattgacaccctgcacctgcggctcctcggacctttatctggtcacgaggcacgccgatgtcttcccgtgcgccggcggggtgatagcaggggcagcctgctttcgccccggcctatttcctacttgaaaggctcctcggggggtccgctgttgtgccccgcggggcatgctgtgggcatattcagggcgcagtgtgcacccgtggagtggctaaggcggtggactttatccctgtagagaacctagagacaaccatgaggtccccggtgttcacggacaactcctctccaccggcagtaccccagagcttccaggtggcccacctgcatctcccacaggcagcggcaagagcaccaaggtcccggctgcatacgcagctcagggctataaggtgctagtgctcaacccctctgttgctgcaacactgggcttcggtgtttatatgtccaaggcccagggatcgatcctaacatcaggaccggggtgagaacaattaccactggcagccccatcacgtactccacctacggcaagttccttgccgacggcgggtgctcagggggtgcttatgacataataatctgtgacgagtgccacccacggatgccacatctatcttaggcatcggcaccgtccttgaccaagcagagaccgcgggggcgaggcttgttgtgctcgccaccgctacccctccgggctccgtcaccgtgccccatcctaacatgaggaggttgctctgtccaccaccggagagatccctttttatggcaaggctatccccctcgaagtaatcaagggggggaggcatctcatcttctgtcattcaaagaagaagtgtgacgagctcgccgcaaagctggttgcatgggcgtcaatgccgtggcctattaccgcggccttgacgtgtctgtcatcccgaccagcggcgatgttgtcgtcgtggcaactgatgctctcatgaccggctataccggcgacttcgactcggtgatgactgcaatacgtgtgtcacccagacagttgatttcagccttgaccccaccttcaccattgagacaaccacgcttccccaggatgctgtctcccgtacacaacgtcggggcaggactggcagggggaagccaggcacctacgatttgtggcaccgggggagcgcccctccggcatgttcgactcgtctgtcctctgtgagtgctatgacgcgggctgtgcttggtatgagctcacgcccgccgagactacagttaggctacgagcgtaatgaacaccccggggcttcccgtgtgccaggaccaccttgaattttgggagggcgtctttacgggccttactcatatagatgcccacttcctatcccagacaaagcagagtggggagaaccttccttacctggtagcgtacaagccaccgtgtgcgctagggctcaagcccctcccccatcgtgggaccagatgtggaagtgcttggtccgcctcaagcccaccctccatgggccaacacccctgctatacagattgggcgctgttcaaatgaagtcaccctgacacacccaatcacaaaatacatcatgacatgtatgtcggctga

SEQ ID NO: 392 - DNA, 4853 bp, Hepatitis C virus
tcgcccacaggacgtcaagttcccgggtggcggtcagatcgttggtggagtttacttgttgccgcgcaggggccctagattgggtgtgcgcgcgacgaggaagacttccgagcggtcgcaacctcgagtagacgtcagcctatccccaaggcacgtcggcccgagggcaggacctgggctcagcccgggtacccttggcccctctacggcaatgagggctgcggatgggcgggatggctcctgtctccccgtggtctcggcctagttggggccccacagacccccggcgtaggtcgcgcaatttgggtaaggtcatcgatacccttacgtgcggcttcgccgacctcatggggtacataccgctcgtcggcgccccccttggaggcgctgccaggccctggcgcacggcgtccgggttctggaagacggcgtgaactatgcaacagggaatcttcctggttgctctttctctatcttcctcctggccctgctctcttgcttgaccgtgcccgcttcggcctacaagtgcgcaactccacggggctttatcatgtcaccaacgactgccctaattcgagtattgtgtacgaggcggccgatgctatcctgcacactccggggtgtgtcccttgcgttcgcgagggtaacgtctcgaggtgctggtggcgatgacccccacggtggccactagggacggcaagctccccacaacgcagcttcgacgccacatcgatctgcttgtcgggagcgccaccctttgctcggccctctacgtgggggacctgtgcggtctgtctttcttgtcggtcagatgtttactttctctcccaggcgccactggacgacgcaagactgcaattgttccatgtaccctggccatataacgggtcaccgcatggcatgggatatgatgatgaactggtcccctacgcggcgttgatagtagctcagctgctccggatcccacaagccatcttggacatgatcgctggtgctcactggggagtcctggcgggcattgcgtacttttccatggtggggaactgggcgaaggtcctgtagtgctgctgttatttgccggcgtcgacgcgggaacccacgtcagcgggggagccgtcgcccgtggcgcagcttcaattgccgggttgtttaactcaggtgccaaacagaacatccagctgatcaacaccaacggcagtggcacatcaatagcacggccttgaactgcaatgatagccttaacaccggctggatagcagggcttttctactacaacaaattcaactcttcaggctgtcccgacaggttggccagctgccggcgcctaccgattttgcccagggctggggccctatcagtcacgccaacggaagtggccccgacgaacgcccttactgctggcactaccccccaagaccttgtggtattgtgccggcaaagagcgtgtgtggcccagtatattgcttccccccagccctgtggtggtggggacgaccgacaagtcgggcgcgcctacctacaactggggtgataatgatacggacgttttcgtccttaacaacactaggccaccgctgggcaattggttcggttgacctggatgaactcaactggattcaccaaagtgtgcggagcgcccccctgtgtcatcggaggggtgggcaataacaccttgcgctgccccactgattgtttccgcaagcatccggaagccacgtactctcggtgcggctctgtccctggattacacccaggtgcctggtcgactatccgtataggctgtggcattatccttgtaccatcaactacaccatcttcaaagtcaggatgtacgtgggaggggtcgagcacaggctggaagcgcctgcaactggacgcggggcgaacgttgtgatctggacgacagggacaggtccgagctcagcccgttgctgctgtccaccacgcagtggcagatccttccgtgttccttcacgaccctgccagccttgtccaccggcctctccacctccaccagaacattgtggacgtgcagtacttgtacggggtggggtcaagcatcgcgtcctgggccattaaatgggactacgtcgtcctcctcttccttttgcttgcagacgcgcgcgtctgtcctgcttgtggatgatgttactcatatcccaagcggaggcggctttggagaacctcgtagtactcaatgcagcatccctggccgggacacacggtcttgcatccttcctcgtgttcttctgctttgcgtggtatctgaaggtaggtgggtgcccggagcagtctacgccctctacgggatgtggcctctcctcctgctcctgttggcgttgccccagcgggcatacgcactggacacggaggtggccgcgtcgtgtggcggcgttgtcttgtcggggtaatggcgctgactctgtcaccatattacaagcactatatcggctggtgcttgtggtggcttcagtattttctgactagagcagaagcgcaactgcatgtgtgggttccccccctcaacgttcgagggggggcgatgccgtcatcttactcatgtgtgttgtacacccgaccttggtatttgacatcaccaagctactgctggccgtcttcggacccctttgggttctgcaagccagcctgcttaaggtgccctacttgtgcgcgttcaaggccttctccggctctgcgcgctagcgcggaaggtggtcggaggccattacgtgcaaatggtcatcatcaagttgggggcgcttactggcacttatgtctataaccatctcactcctcttcgggactggcgcacaacggcctccaagatctggccgtggctgtagagccagtcgtcttctcccgaatggaaaccaagctcatcacgtggggggcagacactgccgcgtgcggtgatatcatcaacggcttgcccgttccgcccgcagggggcaggagatactgctcggaccagccgatggaatggtctccaaggggtggaggttgctggcgcccatcacggcgtacgcccagcagacgaggggcctcctagggtgcataatcaccagcctgactggcgagacaaaaaccaagtggagggtgaagtccagattgtgtcaactgctgcccaaacttttctggcaacgtgcatcaatggggtatgctggactgtctaccatggggctggaacgaggaccattgcatccccaagggtcctgttatccagatgtataccaatgtggacaaagaccttgtgggctggcccgcccctcaaggttcccgctcattgacaccctgcacctgcggctcctcggacctctacttggtcacgaggcatgccgatgtcttcccgtgcgccggcgaggtgatagcaggggcagcctgctttcgccccggcccatttcctacttgaaaggctcctcggggggtccgctgttgtgccccgcggggcacgccgtgggcatattcagggcgcggtgtgcacccgtggagtggctaaggcggtggacttcatccctgtggagaacctagagacaaccatgaggtccccggtgtttacggacaactcctctccaccagcagtgccccagagcttccaggtggcccacctgcacctcccaccggcagcggcaagagcaccaaggtcccggctgcatacgcggctcagggctataaagtgctagtgctcaacccctccgttgctgcaacactgggctttggtgcttacatgtccaaggcccaggggtcgagcctaatatcaggaccggggtgagaacaattaccactggcagccccattacgtactccacctatggcaagttccttgccgacggcgggtgttcagggggcgcctatgacataataatttgtgatgagtgccacccacggatgccacatccatcttgggcatcggcactgtcctcgaccaagcagagactgcgggggcgagactggttgtgctcgccaccgctactcctccgggctctgtcactgtgccccatcctaacatgaggaggttgctctgtccaccaccggagaggtccctttttacggcaaggccatcccccttgaggtaatcaaaggggggagacatctcatcttctgtcactcaaagaagaagtgcgatgagctcgccgcaaagctggtcgcgtgggcgtcaatgccgtggcctactaccgcggtcttgacgtttctgtcatcccaaccagcggcgatgttgtcgtcgtggcgaccgacgctctcatgaccggctttaccggcgacttcgactcggtgatgactgcaacacgtgtgtcactcagacagtcgatttcagccttgaccctaccttcaccattgagacaaccacgctcccccaggatgctgtctcccgtactcaacgtcggggcaggactggcagggggaagccaggcatctacgatttgtggcaccgggagagcgcccctctggcatgttcgactcgtctgtcctctgcgagtgctatgacgcgggctgtgcttggtatgagctgacgcccgccgagactacagttaggctacgagcgtaatgaacaccccggggcttcccgtgtgccaggaccatcttgagttttgggagggcgtctttacgggcctcacccatatagatgcccattttctgtcccagacaaagcagagtggggagaaccttccttacctggtagcgtacaagccaccgtgtgcgctagggctcaagcccctcccccatcgtgggaccagatgtggaagtgtttgatccgcctcaaacccaccctccacgggccaacacccctgctatacagactgggtgctgttcaaatgaagtcaccctgacgcacccaatcaccaaatacatcatga

SEQ ID NO: 393 - DNA, 4853 bp, Hepatitis C virus
tcgcccacaggacgtcaagttcccgggtggcggtcagatcgttggtggagtttatttgttgccgcgcaggggccctagattgggtgtgcgcgcgacgaggaagacttccgagcggtcgcaacctcgagtagacgtcagcctatccccaaggcacgtcggcccgagggcaggacctgggctcagcccgggtacccttggcccctctacggcaatgagggctgcggatgggcgggatggctcctgtctccccgtggtctcggcctagttggggccccacagacccccggcgtaggtcgcgcaatttgggtaaggtcatcgatacccttacgtgcggcttcgccgacctcatggggtacataccgctcgtcggcgccccccttggaggcgctgccaggccctggcgcacggcgtccgggttctggaagacggcgtaaactatgcaacagggaatcttcctggttgctctttctctatcttcctcctggccctgctctcttgcttgaccgtgcccgcttcggcctacaagtgcgcaactccacggggctttatcatgtcaccaacgactgccctaattcgagtattgtgtacgaggcggccgatgctatcctgcacactccggggtgtgtcccttgcgttcgcgagggtaacgtctcgaggtgctggtggcgatgacccccacggtggccactagggacggcaagctccccacaacgcagcttcgacgccacatcgatctgcttgtcgggagcgccaccctttgctcggccctctacgtgggggacctgtgcggtctgtctttcttgtcggtcagatgtttactttctctcccaggcgccactggacgacgcaagactgcaattgttccatgtaccccggccatataacgggtcaccgcatggcatgggatatgatgatgaactggtcccctacgcggcgttgatagtagctcagctgctccggatcccacaagccatcttggacatgatcgctggtgctcactggggagtcctggcgggcattgcgtacttttccatggtggggaactgggcgaaggtcctgtagtgctgctgttatttgccggcgtcgacgcgggaacccacgtcagcgggggagccgtcgcccgtggcgcagcttcaattgccgggttgtttaactcaggtgccaaacagaacatccagctgatcaacaccaacggcagtggcacatcaatagcacggccttgaactgcaatgatagccttaacaccggctggatagcagggcttttctactacaacaaattcaactcttcaggctgtcccgacaggttggccagctgccggcgcctaccgattttgcccagggctggggccctatcagtcacgccaacggaagtggccccgacgaacgcccttactgctggcactaccccccaagaccttgtggtattgtgccggcaaagagcgtgtgtggcccagtatattgcttccccccagccctgtggtggtggggacgaccgacaagtcgggcgcgcctacctacaactggggtgataatgatacggacgttttcgtccttaacaacactaggccaccgctgggcaattggttcggttgacctggatgaactcaactggattcaccaaagtgtgcggagcgcccccctgtgtcatcggaggggtgggcaataacaccttgcgctgccccactgattgtttccgcaagcatccggaagccacgtactctcggtgcggctctgtccctggattacacccaggtgcctggtcgactatccgtataggctgtggcattatccttgtaccatcaactacaccatcttcaaagtcaggatgtacgtgggaggggtcgagcacaggctggaagcgcctgcaactggacgcggggcgaacgttgtgatctggacgacagggacaggtccgagctcagcccgttgctgctgtccaccacgcagtggcagatccttccgtgttccttcacgaccctgccagccttgtccaccggcctctccacctccaccagaacattgtggacgtgcagtacttgtacggggtggggtcaagcatcgcgtcctgggccattaaatgggactacgtcgtcctcctcttccttttgcttgcagacgcgcgcgtctgtcctgcttgtggatgatgttactcatatcccaagcggaggcggctttggagaacctcgtagtactcaatgcagcatccctggccgggacacacggtcttgcatccttcctcgtgttcttctgctttgcgtggtatctgaaggtaggtgggtgcccggagcagtctacgccctctacgggatgtggcctctcctcctgctcctgttggcgttgccccagcgggcatacgcactggacacggaggtggccgcgtcgtgtggcggcgttgtcttgtcggggtaatggcgctgactctgtcaccatattacaagcactatatcggctggtgcttgtggtggcttcagtattttctgactagagcagaagcgcaactgcatgtgtgggttccccccctcaacgttcgagggggggcgatgccgtcatcttactcatgtgtgttgtacacccgaccttggtatttgacatcaccaagctactgctggccgtcttcggacccctttgggttctgcaagccagcctgcttaaggtgccctacttgtgcgcgttcaaggccttctccggctctgcgcgctagcgcggaaggtggtcggaggccattacgtgcaaatggtcatcatcaagttgggggcgcttactggcacttatgtctataaccatctcactcctcttcgggactggcgcacaacggcctccaagatctggccgtggctgtagagccagtcgtcttctcccgaatggaaaccaagctcatcacgtggggggcagacactgccgcgtgcggtgatatcatcaacggcttgcccgttccgcccgcagggggcaggagatactgctcggaccagccgatggaatggtctccaaggggtggaggttgctggcgcccatcacggcgtacgcccagcagacgaggggcctcctagggtgcataatcaccagcctgactggcgagacaaaaaccaagtggagggtgaagtccagattgtgtcaactgctgcccaaacttttctggcaacgtgcatcaatggggtatgctggactgtctaccatggggctggaacgaggaccattgcatccccaagggtcctgttatccagatgtataccaatgtggacaaagaccttgtgggctggcccgcccctcaaggttcccgctcattgacaccctgcacctgcggctcctcggacctctacttggtcacgaggcatgccgatgtcttcccgtgcgccggcgaggtgatagcaggggcagcctgctttcgccccggcccatttcctacttgaaaggctcctcggggggtccgctgttgtgccccgcggggcacgccgtgggcatattcagggcgcggtgtgcacccgtggagtggctaaggcggtggacttcatccctgtggagaacctagagacaaccatgaggtccccggtgtttacggacaactcctctccaccagcagtgccccagagcttccaggtggcccacctgcacctcccaccggcagcggcaagagcaccaaggtcccggctgcatacgcggctcagggctataaagtgctagtgctcaacccctccgttgctgcaacactgggctttggtgcttacatgtccaaggcccaggggtcgagcctaatatcaggaccggggtgagaacaattaccactggcagccccattacgtactccacctatggcaagttccttgccgacggcgggtgttcagggggcgcctatgacataataatttgtgatgagtgccacccacggatgccacatccatcttgggcatcggcactgtcctcgaccaagcagagactgcgggggcgagactggttgtgctcgccaccgctactcctccgggctctgtcactgtgccccatcctaacatgaggaggttgctctgtccaccaccggagaggtccctttttacggcaaggccatcccccttgaggtaatcaaaggggggagacatctcatcttctgtcactcaaagaagaagtgcgatgagctcgccgcaaagctggtcgcgtgggcgtcaatgccgtggcctactaccgcggtcttgacgtttctgtcatcccaaccagcggcgatgttgtcgtcgtggcgaccgacgctctcatgaccggctttaccggcgacttcgactcggtgatgactgcaacacgtgtgtcactcagacagtcgatttcagccttgaccctaccttcaccattgagacaaccacgctcccccaggatgctgtctcccgtactcaacgtcggggcaggactggcagggggaagccaggcatctacgatttgtggcaccgggagagcgcccctctggcatgttcgactcgtctgtcctctgcgagtgctatgacgcgggctgtgcttggtatgagctgacgcccgccgagactacagttaggctacgagcgtaatgaacaccccggggcttcccgtgtgccaggaccatcttgagttttgggagggcgtctttacgggcctcacccatatagatgcccattttctgtcccagacaaagcagagtggggagaaccttccttacctggtagcgtacaagccaccgtgtgcgctagggctcaagcccctcccccatcgtgggaccagatgtggaagtgtttgatccgcctcaaacccaccctccacgggccaacacccctgctatacagactgggtgctgttcaaatgaagtcaccctgacgcacccaatcaccaaatacatcatga

SEQ ID NO: 394 - DNA, 4853 bp, Hepatitis C virus
tcgcccacaggacgtcaagttcccgggtggcggtcagatcgttggtggagtttacttgttgccgcgcaggggccctagattgggtgtgcgcgcgacgaggaagacttccgagcggtcgcaacctcgagtagacgtcagcctatccccaaggcacgtcggcccgagggcaggacctgggctcagcccgggtacccttggcccctctacggcaatgagggctgcggatgggcgggatggctcctgtctccccgtggtctcggcctagttggggccccacagacccccggcgtaggtcgcgcaatttgggtaaggtcatcgatacccttacgtgcggcttcgccgacctcatggggtacataccgctcgtcggcgccccccttggaggcgctgccaggccctggcgcacggcgtccgggttctggaagacggcgtgaactatgcaacagggaatcttcctggttgctctttctctatcttcctcctggccctgctctcttgcttgaccgtgcccgcttcggcctacaagtgcgcaactccacggggctttatcatgtcaccaacgactgccctaattcgagtattgtgtacgaggcggccgatgctatcctgcacactccggggtgtgtcccttgcgttcgcgagggtaacgtctcgaggtgctggtggcgatgacccccacggtggccactagggacggcaagctccccacaacgcagcttcgacgccacatcgatctgcttgtcgggagcgccaccctttgctcggccctctacgtgggggacctgtgcggtctgtctttcttgtcggtcagatgtttactttctctcccaggcgccactggacgacgcaagactgcaattgttccatgtaccccggccatataacgggtcaccgcatggcatgggatatgatgatgaactggtcccctacgcggcgttgatagtagctcagctgctccggatcccacaagccatcttggacatgatcgctggtgctcactggggagtcctggcgggcattgcgtacttttccatggtggggaactgggcgaaggtcctgtagtgctgctgttatttgccggcgtcgacgcgggaacccacgtcagcgggggagccgtcgcccgtggcgcagcttcaattgccgggttgtttaactcaggtgccaaacagaacatccagctgatcaacaccaacggcagtggcacatcaatagcacggccttgaactgcaatgatagccttaacaccggctggatagcagggcttttctactacaacaaattcaactcttcaggctgtcccgacaggttggccagctgccggcgcctaccgattttgcccagggctggggccctatcagtcacgccaacggaagtggccccgacgaacgcccttactgctggcactaccccccaagaccttgtggtattgtgccggcaaagagcgtgtgtggcccagtatattgcttccccccagccctgtggtggtggggacgaccgacaagtcgggcgcgcctacctacaactggggtgataatgatacggacgttttcgtccttaacaacactaggccaccgctgggcaattggttcggttgacctggatgaactcaactggattcaccaaagtgtgcggagcgcccccctgtgtcatcggaggggtgggcaataacaccttgcgctgccccactgattgtttccgcaagcatccggaagccacgtactctcggtgcggctctgtccctggattacacccaggtgcctggtcgactatccgtataggctgtggcattatccttgtaccatcaactacaccatcttcaaagtcaggatgtacgtgggaggggtcgagcacaggctggaagcgcctgcaactggacgcggggcgaacgttgtgatctggacgacagggacaggtccgagctcagcccgttgctgctgtccaccacgcagtggcagatccttccgtgttccttcacgaccctgccagccttgtccaccggcctctccacctccaccagaacattgtggacgtgcagtacttgtacggggtggggtcaagcatcgcgtcctgggccattaaatgggactacgtcgtcctcctcttccttttgcttgcagacgcgcgcgtctgtcctgcttgtggatgatgttactcatatcccaagcggaggcggctttggagaacctcgtagtactcaatgcagcatccctggccgggacacacggtcttgcatccttcctcgtgttcttctgctttgcgtggtatctgaaggtaggtgggtgcccggagcagtctacgccctctacgggatgtggcctctcctcctgctcctgttggcgttgccccagcgggcatacgcactggacacggaggtggccgcgtcgtgtggcggcgttgtcttgtcggggtaatggcgctgactctgtcaccatattacaagcactatatcggctggtgcttgtggtggcttcagtattttctgactagagcagaagcgcaactgcatgtgtgggttccccccctcaacgttcgagggggggcgatgccgtcatcttactcatgtgtgttgtacacccgactttggtatttgacatcaccaagctactgctggccgtcttcggacccctttgggttctgcaagccagcctgcttaaggtgccctacttgtgcgcgttcaaggccttctccggctctgcgcgctagcgcggaaggtggtcggaggccattacgtgcaaatggtcatcatcaagttgggggcgcttactggcacttatgtctataaccatctcactcctcttcgggactggcgcacaacggcctccaagatctggccgtggctgtagagccagtcgtcttctcccgaatggaaaccaagctcatcacgtggggggcagacactgccgcgtgcggtgatatcatcaacggcttgcccgttccgcccgcagggggcaggagatactgctcggaccagccgatggaatggtctccaaggggtggaggttgctggcgcccatcacggcgtacgcccagcagacgaggggcctcctagggtgcataatcaccagcctgactggcgagacaaaaaccaagtggagggtgaagtccagattgtgtcaactgctgcccaaacttttctggcaacgtgcatcaatggggtatgctggactgtctaccatggggctggaacgaggaccattgcatccccaagggtcctgttatccagatgtataccaatgtggacaaagaccttgtgggctggcccgcccctcaaggttcccgctcattgacaccctgcacctgcggctcctcggacctctacttggtcacgaggcatgccgatgtcttcccgtgcgccggcgaggtgatagcaggggcagcctgctttcgccccggcccatttcctacttgaaaggctcctcggggggtccgctgttgtgccccgcggggcacgccgtgggcatattcagggcgcggtgtgcacccgtggagtggctaaggcggtggacttcatccctgtggagaacctagagacaaccatgaggtccccggtgtttacggacaactcctctccaccagcagtgccccagagcttccaggtggcccacctgcacctcccaccggcagcggcaagagcaccaaggtcccggctgcatacgcggctcagggctataaagtgctagtgctcaacccctccgttgctgcaacactgggctttggtgcttacatgtccaaggcccaggggtcgagcctaatatcaggaccggggtgagaacaattaccactggcagccccattacgtactccacctatggcaagttccttgccgacggcgggtgttcagggggcgcctatgacataataatttgtgatgagtgccacccacggatgccacatccatcttgggcatcggcactgtcctcgaccaagcagagactgcgggggcgagactggttgtgctcgccaccgctactcctccgggctctgtcactgtgccccatcctaacatgaggaggttgctctgtccaccaccggagaggtccctttttacggcaaggccatcccccttgaggtaatcaaaggggggagacatctcatcttctgtcactcaaagaagaagtgcgatgagctcgccgcaaagctggtcgcgtgggcgtcaatgccgtggcctactaccgcggtcttgacgtttctgtcatcccaaccagcggcgatgttgtcgtcgtggcgaccgacgctctcatgaccggctttaccggcgacttcgactcggtgatgactgcaacacgtgtgtcactcagacagtcgatttcagccttgaccctaccttcaccattgagacaaccacgctcccccaggatgctgtctcccgtactcaacgtcggggcaggactggcagggggaagccaggcatctacgatttgtggcaccgggagagcgcccctctggcatgttcgactcgtctgtcctctgcgagtgctatgacgcgggctgtgcttggtatgagctgacgcccgccgagactacagttaggctacgagcgtaatgaacaccccggggcttcccgtgtgccaggaccatcttgagttttgggagggcgtctttacgggcctcacccatatagatgcccattttctgtcccagacaaagcagagtggggagaaccttccttacctggtagcgtacaagccaccgtgtgcgctagggctcaagcccctcccccatcgtgggaccagatgtggaagtgtttgatccgcctcaaacccaccctccacgggccaacacccctgctatacagactgggtgctgttcaaatgaagtcaccctgacgcacccaatcaccaaatacatcatga

SEQ ID NO: 395 - DNA, 4853 bp, Hepatitis C virus
tcgcccacaggacgtcaagttcccgggtggcggtcagatcgttggtggagtttacttgttgccgcgcaggggccctagattgggtgtgcgcgcgacgaggaagacttccgagcggtcgcaacctcgagtagacgtcagcctatccccaaggcacgtcggcccgagggcaggacctgggctcagcccgggtacccttggcccctctacggcaatgagggctgcggatgggcgggatggctcctgtctccccgtggtctcggcctagttggggccccacagacccccggcgtaggtcgcgcaatttgggtaaggtcatcgatacccttacgtgcggcttcgccgacctcatggggtacataccgctcgtcggcgccccccttggaggcgctgccaggccctggcgcacggcgtccgggttctggaagacggcgtgaactatgcaacagggaatcttcctggttgctctttctctatcttcctcctggccctgctctcttgcttgaccgtgcccgcttcggcctacaagtgcgcaactccacggggctttatcatgtcaccaacgactgccctaattcgagtattgtgtacgaggcggccgatgctatcctgcacactccggggtgtgtcccttgcgttcgcgagggtaacgtctcgaggtgctggtggcgatgacccccacggtggccactagggacggcaagctccccacaacgcagcttcgacgccacatcgatctgcttgtcgggagcgccaccctttgctcggccctctacgtgggggacctgtgcggtctgtctttcttgtcggtcagatgtttactttctctcccaggcgccactggacgacgcaagactgcaattgttccatgtaccccggccatataacgggtcaccgcatggcatgggatatgatgatgaactggtcccctacgcggcgttgatagtagctcagctgctccggatcccacaagccatcttggacatgatcgctggtgctcactggggagtcctggcgggcattgcgtacttttccatggtggggaactgggcgaaggtcctgtagtgctgctgttatttgccggcgtcgacgcgggaacccacgtcagcgggggagccgtcgcccgtggcgcagcttcaattgccgggttgtttaactcaggtgccaaacagaacatccagctgatcaacaccaacggcagtggcacatcaatagcacggccttgaactgcaatgatagccttaacaccggctggatagcagggcttttctactacaacaaattcaactcttcaggctgtcccgacaggttggccagctgccggcgcctaccgattttgcccagggctggggccctatcagtcacgccaacggaagtggccccgacgaacgcccttactgctggcactaccccccaagaccttgtggtattgtgccggcaaagagcgtgtgtggcccagtatattgcttccccccagccctgtggtggtggggacgaccgacaagtcgggcgcgcctacctacaactggggtgataatgatacggacgttttcgtccttaacaacactaggccaccgctgggcaattggttcggttgacctggatgaactcaactggattcaccaaagtgtgcggagcgcccccctgtgtcatcggaggggtgggcaataacaccttgcgctgccccactgattgtttccgcaagcatccggaagccacgtactctcggtgcggctctgtccctggattacacccaggtgcctggtcgactatccgtataggctgtggcattatccttgtaccatcaactacaccatcttcaaagtcaggatgtacgtgggaggggtcgagcacaggctggaagcgcctgcaactggacgcggggcgaacgttgtgatctggacgacagggacaggtccgagctcagcccgttgctgctgtccaccacgcagtggcagatccttccgtgttccttcacgaccctgccagccttgtccaccggcctctccacctccaccagaacattgtggacgtgcagtatttgtacggggtggggtcaagcatcgcgtcctgggccattaaatgggactacgtcgtcctcctcttccttttgcttgcagacgcgcgcgtctgtcctgcttgtggatgatgttactcatatcccaagcggaggcggctttggagaacctcgtagtactcaatgcagcatccctggccgggacacacggtcttgcatccttcctcgtgttcttctgctttgcgtggtatctgaaggtaggtgggtgcccggagcagtctacgccctctacgggatgtggcctctcctcctgctcctgttggcgttgccccagcgggcatacgcactggacacggaggtggccgcgtcgtgtggcggcgttgtcttgtcggggtaatggcgctgactctgtcaccatattacaagcactatatcggctggtgcttgtggtggcttcagtattttctgactagagcagaagcgcaactgcatgtgtgggttccccccctcaacgttcgagggggggcgatgccgtcatcttactcatgtgtgttgtacacccgaccttggtatttgacatcaccaagctactgctggccgtcttcggacccctttgggttctgcaagccagcctgcttaaggtgccctacttgtgcgcgttcaaggccttctccggctctgcgcgctagcgcggaaggtggtcggaggccattacgtgcaaatggtcatcatcaagttgggggcgcttactggcacttatgtctataaccatctcactcctcttcgggactggcgcacaacggcctccaagatctggccgtggctgtagagccagtcgtcttctcccgaatggaaaccaagctcatcacgtggggggcagacactgccgcgtgcggtgatatcatcaacggcttgcccgttccgcccgcagggggcaggagatactgctcggaccagccgatggaatggtctccaaggggtggaggttgctggcgcccatcacggcgtacgcccagcagacgaggggcctcctagggtgcataatcaccagcctgactggcgagacaaaaaccaagtggagggtgaagtccagattgtgtcaactgctgcccaaacttttctggcaacgtgcatcaatggggtatgctggactgtctaccatggggctggaacgaggaccattgcatccccaagggtcctgttatccagatgtataccaatgtggacaaagaccttgtgggctggcccgcccctcaaggttcccgctcattgacaccctgcacctgcggctcctcggacctctacttggtcacgaggcatgccgatgtcttcccgtgcgccggcgaggtgatagcaggggcagcctgctttcgccccggcccatttcctacttgaaaggctcctcggggggtccgctgttgtgccccgcggggcacgccgtgggcatattcagggcgcggtgtgcacccgtggagtggctaaggcggtggacttcatccctgtggagaacctagagacaaccatgaggtccccggtgtttacggacaactcctctccaccagcagtgccccagagcttccaggtggcccacctgcacctcccaccggcagcggcaagagcaccaaggtcccggctgcatacgcggctcagggctataaagtgctagtgctcaacccctccgttgctgcaacactgggctttggtgcttacatgtccaaggcccaggggtcgagcctaatatcaggaccggggtgagaacaattaccactggcagccccattacgtactccacctatggcaagttccttgccgacggcgggtgttcagggggcgcctatgacataataatttgtgatgagtgccacccacggatgccacatccatcttgggcatcggcactgtcctcgaccaagcagagactgcgggggcgagactggttgtgctcgccaccgctactcctccgggctctgtcactgtgccccatcctaacatgaggaggttgctctgtccaccaccggagaggtccctttttacggcaaggccatcccccttgaggtaatcaaaggggggagacatctcatcttctgtcactcaaagaagaagtgcgatgagctcgccgcaaagctggtcgcgtgggcgtcaatgccgtggcctactaccgcggtcttgacgtttctgtcatcccaaccagcggcgatgttgtcgtcgtggcgaccgacgctctcatgaccggctttaccggcgacttcgactcggtgatgactgcaacacgtgtgtcactcagacagtcgatttcagccttgaccctaccttcaccattgagacaaccacgctcccccaggatgctgtctcccgtactcaacgtcggggcaggactggcagggggaagccaggcatctacgatttgtggcaccgggagagcgcccctctggcatgttcgactcgtctgtcctctgcgagtgctatgacgcgggctgtgcttggtatgagctgacgcccgccgagactacagttaggctacgagcgtaatgaacaccccggggcttcccgtgtgccaggaccatcttgagttttgggagggcgtctttacgggcctcacccatatagatgcccattttctgtcccagacaaagcagagtggggagaaccttccttacctggtagcgtacaagccaccgtgtgcgctagggctcaagcccctcccccatcgtgggaccagatgtggaagtgtttgatccgcctcaaacccaccctccacgggccaacacccctgctatacagactgggtgctgttcaaatgaagtcaccctgacgcacccaatcaccaaatacatcatga

SEQ ID NO: 396 - DNA, 4853 bp, Hepatitis C virus
tcgcccacaggacgtcaagttcccgggtggcggtcagatcgttggtggagtttacttgttgccgcgcaggggccctagattgggtgtgcgcgcgacgaggaagacttccgagcggtcgcaacctcgagtagacgtcagcctatccccaaggcacgtcggcccgagggcaggacctgggctcagcccgggtacccttggcccctctacggcaatgagggctgcggatgggcgggatggctcctgtctccccgtggtctcggcctagttggggccccacagacccccggcgtaggtcgcgcaatttgggtaaggtcatcgatacccttacgtgcggcttcgccgacctcatggggtacataccgctcgtcggcgccccccttggaggcgctgccaggccctggcgcacggcgtccgggttctggaagacggcgtgaactatgcaacagggaatcttcctggttgctctttctctatcttcctcctggccctgctctcttgcttgaccgtgcccgcttcggcctacaagtgcgcaactccacggggctttatcatgtcaccaacgactgccctaattcgagtattgtgtacgaggcggccgatgctatcctgcacactccggggtgtgtcccttgcgttcgcgagggtaacgtctcgaggtgctggtggcgatgacccccacggtggccactagggacggcaagctccccacaacgcagcttcgacgccacatcgatctgcttgtcgggagcgccaccctttgctcggccctctacgtgggggacctgtgcggtctgtctttcttgtcggtcagatgtttactttctctcccaggcgccactggacgacgcaagactgcaattgttccatgtaccccggccatataacgggtcaccgcatggcatgggatatgatgatgaactggtcccctacgcggcgttgatagtagctcagctgctccggatcccacaagccatcttggacatgatcgctggtgctcactggggagtcctggcgggcattgcgtacttttccatggtggggaactgggcgaaggtcctgtagtgctgctgttatttgccggcgtcgacgcgggaacccacgtcagcgggggagccgtcgcccgtggcgcagcttcaattgccgggttgtttaactcaggtgccaaacagaacatccagctgatcaacaccaacggcagtggcacatcaatagcacggccttgaactgcaatgatagccttaacaccggctggatagcagggcttttctactacaacaaattcaactcttcaggctgtcccgacaggttggccagctgccggcgcctaccgattttgcccagggctggggccctatcagtcacgccaacggaagtggccccgacgaacgcccttactgctggcactaccccccaagaccttgtggtattgtgccggcaaagagcgtgtgtggcccagtatattgcttccccccagccctgtggtggtggggacgaccgacaagtcgggcgcgcctacctacaactggggtgataatgatacggacgttttcgtccttaacaacactaggccaccgctgggcaattggttcggttgacctggatgaactcaactggattcaccaaagtgtgcggagcgcccccctgtgtcatcggaggggtgggcaataacaccttgcgctgccccactgattgtttccgcaagcatccggaagccacgtactctcggtgcggctctgtccctggattacacccaggtgcctggtcgactatccgtataggctgtggcattatccttgtaccatcaactacaccatcttcaaagtcaggatgtacgtgggaggggtcgagcacaggctggaagcgcctgcaactggacgcggggcgaacgttgtgatctggacgacagggacaggtccgagctcagcccgttgctgctgtccaccacgcagtggcagatccttccgtgttccttcacgaccctgccagccttgtccaccggcctctccacctccaccagaacattgtggacgtgcagtacttgtacggggtggggtcaagcatcgcgtcctgggccattaaatgggactacgtcgtcctcctcttccttttgcttgcagacgcgcgcgtctgtcctgcttgtggatgatgttactcatatcccaagcggaggcggctttggagaacctcgtagtactcaatgcagcatccctggccgggacacacggtcttgcatccttcctcgtgttcttctgctttgcgtggtatctgaaggtaggtgggtgcccggagcagtctacgccctctacgggatgtggcctctcctcctgctcctgttggcgttgccccagcgggcatacgcactggacacggaggtggccgcgtcgtgtggcggcgttgtcttgtcggggtaatggcgctgactctgtcaccatattacaagcactatatcggctggtgcttgtggtggcttcagtattttctgactagagcagaagcgcaactgcatgtgtgggttccccccctcaacgttcgagggggggcgatgccgtcatcttactcatgtgtgttgtacacccgaccttggtatttgacatcaccaagctactgctggccgtcttcggacccctttgggttctgcaagccagcctgcttaaggtgccctacttgtgcgcgttcaaggccttctccggctctgcgcgctagcgcggaaggtggtcggaggccattacgtgcaaatggtcatcatcaagttgggggcgcttactggcacttatgtctataaccatctcactcctcttcgggactggcgcacaacggcctccaagatctggccgtggctgtagagccagtcgtcttctcccgaatggaaaccaagctcatcacgtggggggcagacactgccgcgtgcggtgatatcatcaacggcttgcccgttccgcccgcagggggcaggagatactgctcggaccagccgatggaatggtctccaaggggtggaggttgctggcgcccatcacggcgtacgcccagcagacgaggggcctcctagggtgcataatcaccagcctgactggcgagacaaaaaccaagtggagggtgaagtccagattgtgtcaactgctgcccaaacttttctggcaacgtgcatcaatggggtatgctggactgtctaccatggggctggaacgaggaccattgcatccccaagggtcctgttatccagatgtataccaatgtggacaaagaccttgtgggctggcccgcccctcaaggttcccgctcattgacaccctgcacctgcggctcctcggacctctacttggtcacgaggcatgccgatgtcttcccgtgcgccggcgaggtgatagcaggggcagcctgctttcgccccggcccatttcctacttgaaaggctcctcggggggtccgctgttgtgccccgcggggcacgccgtgggcatattcagggcgcggtgtgcacccgtggagtggctaaggcggtggacttcatccctgtggagaacctagagacaaccatgaggtccccggtgtttacggacaactcctctccaccagcagtgccccagagcttccaggtggcccacctgcacctcccaccggcagcggcaagagcaccaaggtcccggctgcatacgcggctcagggctataaagtgctagtgctcaacccctccgttgctgcaacactgggctttggtgcttacatgtccaaggcccaggggtcgagcctaatatcaggaccggggtgagaacaattaccactggcagccccattacgtactccacctatggcaagttccttgccgacggcgggtgttcagggggcgcctatgacataataatttgtgatgagtgccacccacggatgccacatccatcttgggcatcggcactgtcctcgaccaagcagagactgcgggggcgagactggttgtgctcgccaccgctactcctccgggctctgtcactgtgccccatcctaacatgaggaggttgctctgtccaccaccggagaggtccctttttacggcaaggccatcccccttgaggtaatcaaaggggggagacatctcatcttctgtcactcaaagaagaagtgcgatgagctcgccgcaaagctggtcgcgtgggcgtcaatgccgtggcctactaccgcggtcttgacgtttctgtcatcccaaccagcggcgatgttgtcgtcgtggcgaccgacgctctcatgaccggctttaccggcgacttcgactcggtgatgactgcaacacgtgtgtcactcagacagtcgatttcagccttgaccctaccttcaccattgagacaaccacgctcccccaggatgctgtctcccgtactcaacgtcggggcaggactggcagggggaagccaggcatctacgatttgtggcaccgggagagcgcccctctggcatgttcgactcgtctgtcctctgcgagtgctatgacgcgggctgtgcttggtatgagctgacgcccgccgagactacagttaggctacgagcgtaatgaacaccccggggcttcccgtgtgccaggaccatcttgagttttgggagggcgtctttacgggcctcacccatatagatgcccattttctgtcccagacaaagcagagtggggagaaccttccttacctggtagcgtacaagccaccgtgtgcgctagggctcaagcccctcccccatcgtgggaccagatgtggaagtgtttgatccgcctcaaacccacccttcacgggccaacacccctgctatacagactgggtgctgttcaaatgaagtcaccctgacgcacccaatcaccaaatacatcatga

SEQ ID NO: 397 - DNA, 4853 bp, Hepatitis C virus
tcgcccacaggacgtcaagttcccgggtggcggtcagatcgttggtggagtttacttgttgccgcgcaggggccctagattgggtgtgcgcgcgacgaggaagacttccgagcggtcgcaacctcgagtagacgtcagcctatccccaaggcacgtcggcccgagggcaggacctgggctcagcccgggtacccttggcccctctacggcaatgagggctgcggatgggcgggatggctcctgtctccccgtggtctcggcctagttggggccccacagacccccggcgtaggtcgcgcaatttgggtaaggtcatcgatacccttacgtgcggcttcgccgacctcatggggtacataccgctcgtcggcgccccccttggaggcgctgccaggccctggcgcacggcgtccgggttctggaagacggcgtgaactatgcaacagggaatcttcctggttgctctttctctatcttcctcctggccctgctctcttgcttgaccgtgcccgcttcggcctacaagtgcgcaactccacggggctttatcatgtcaccaacgactgccctaattcgagtattgtgtacgaggcggccgatgctatcctgcacactccggggtgtgtcccttgcgttcgcgagggtaacgtctcgaggtgctggtggcgatgacccccacggtggccactagggacggcaagctccccacaacgcagcttcgacgccacatcgatctgcttgtcgggagcgccaccctttgctcggccctctacgtgggggacctgtgcggtctgtctttcttgtcggtcagatgtttactttctctcccaggcgccactggacgacgcaagactgcaattgttccatgtaccccggccatataacgggtcaccgcatggcatgggatatgatgatgaactggtcccctacgcggcgttgatagtagctcagctgctccggatcccacaagccatcttggacatgatcgctggtgctcactggggagtcctggcgggcattgcgtacttttccatggtggggaactgggcgaaggtcctgtagtgctgctgttatttgccggcgtcgacgcgggaacccacgtcagcgggggagccgtcgcccgtggcgcagcttcaattgccgggttgtttaactcaggtgccaaacagaacatccagctgatcaacaccaacggcagtggcacatcaatagcacggccttgaactgcaatgatagccttaacaccggctggatagcagggcttttctactacaacaaattcaactcttcaggctgtcccgacaggttggccagctgccggcgcctaccgattttgcccagggctggggccctatcagtcacgccaacggaagtggccccgacgaacgcccttactgctggcactaccccccaagaccttgtggtattgtgccggcaaagagcgtgtgtggcccagtatattgcttccccccagccctgtggtggtggggacgaccgacaagtcgggcgcgcctacctacaactggggtgataatgatacggacgttttcgtccttaacaacactaggccaccgctgggcaattggttcggttgacctggatgaactcaactggattcaccaaagtgtgcggagcgcccccctgtgtcatcggaggggtgggcaataacaccttgcgctgccccactgattgtttccgcaagcatccggaagccacgtactctcggtgcggctctgtccctggattacacccaggtgcctggtcgactatccgtataggctgtggcattatccttgtaccatcaactacaccatcttcaaagtcaggatgtacgtgggaggggtcgagcacaggctggaagcgcctgcaactggacgcggggcgaacgttgtgatctggacgacagggacaggtccgagctcagcccgttgctgctgtccaccacgcagtggcagatccttccgtgttccttcacgaccctgccagccttgtccaccggcctctccacctccaccagaacattgtggacgtgcagtacttgtacggggtggggtcaagcatcgcgtcctgggccattaaatgggactacgtcgtcctcctcttccttttgcttgcagacgcgcgcgtctgtcctgcttgtggatgatgttactcatatcccaagcggaggcggctttggagaacctcgtagtactcaatgcagcatccctggccgggacacacggtcttgcatccttcctcgtgttcttctgctttgcgtggtatctgaaggtaggtgggtgcccggagcagtctacgccctctacgggatgtggcctctcctcctgctcctgttggcgttgccccagcgggcatacgcactggacacggaggtggccgcgtcgtgtggcggcgttgtcttgtcggggtaatggcgctgactctgtcaccatattacaagcactatatcggctggtgcttgtggtggcttcagtattttctgactagagcagaagcgcaactgcatgtgtgggttccccccctcaacgttcgagggggggcgatgccgtcatcttactcatgtgtgttgtacacccgaccttggtatttgacatcaccaagctactgctggccgtcttcggacccctttgggttctgcaagccagcctgcttaaggtgccctacttgtgcgcgttcaaggccttctccggctctgcgcgctagcgcggaaggtggtcggaggccattacgtgcaaatggtcatcatcaagttgggggcgcttactggcacttatgtctataaccatctcactcctcttcgggactggcgcacaacggcctccaagatctggccgtggctgtagagccagtcgtcttctcccgaatggaaaccaagctcatcacgtggggggcagacactgccgcgtgcggtgatatcatcaacggcttgcccgttccgcccgcagggggcaggagatactgctcggaccagccgatggaatggtctccaaggggtggaggttgctggcgcccatcacggcgtacgcccagcagacgaggggcctcctagggtgcataatcaccagcctgactggcgagacaaaaaccaagtggagggtgaagtccagattgtgtcaactgctgcccaaacttttctggcaacgtgcatcaatggggtatgctggactgtctaccatggggctggaacgaggaccattgcatccccaagggtcctgttatccagatgtataccaatgtggacaaagaccttgtgggctggcccgcccctcaaggttcccgctcattgacaccctgcacctgcggctcctcggacctctacttggtcacgaggcatgccgatgtcttcccgtgcgccggcgaggtgatagcaggggcagcctgctttcgccccggcccatttcctacttgaaaggctcctcggggggtccgctgttgtgccccgcggggcacgccgtgggcatattcagggcgcggtgtgcacccgtggagtggctaaggcggtggacttcatccctgtggagaacctagagacaaccatgaggtccccggtgtttacggacaactcctctccaccagcagtgccccagagcttccaggtggcccacctgcacctcccaccggcagcggcaagagcaccaaggtcccggctgcatacgcggctcagggctataaagtgctagtgctcaacccctccgttgctgcaacactgggctttggtgcttacatgtccaaggcccaggggtcgagcctaatatcaggaccggggtgagaacaattaccactggcagccccattacgtactccacctatggcaagttccttgccgacggcgggtgttcagggggcgcctatgacataataatttgtgatgagtgccatccacggatgccacatccatcttgggcatcggcactgtcctcgaccaagcagagactgcgggggcgagactggttgtgctcgccaccgctactcctccgggctctgtcactgtgccccatcctaacatgaggaggttgctctgtccaccaccggagaggtccctttttacggcaaggccatcccccttgaggtaatcaaaggggggagacatctcatcttctgtcactcaaagaagaagtgcgatgagctcgccgcaaagctggtcgcgtgggcgtcaatgccgtggcctactaccgcggtcttgacgtttctgtcatcccaaccagcggcgatgttgtcgtcgtggcgaccgacgctctcatgaccggctttaccggcgacttcgactcggtgatgactgcaacacgtgtgtcactcagacagtcgattccagccttgaccctaccttcaccattgagacaaccacgctcccccaggatgctgtctcccgtactcaacgtcggggcaggactggcagggggaagccaggcatctacgatttgtggcaccgggagagcgcccctctggcatgttcgactcgtctgtcctctgcgagtgctatgacgcgggctgtgcttggtatgagctgacgcccgccgagactacagttaggctacgagcgtaatgaacaccccggggcttcccgtgtgccaggaccatcttgagttttgggagggcgtctttacgggcctcacccatatagatgcccattttctgtcccagacaaagcagagtggggagaaccttccttacctggtagcgtacaagccaccgtgtgcgctagggctcaagcccctcccccatcgtgggaccagatgtggaagtgtttgatccgcctcaaacccaccctccacgggccaacacccctgctatacagactgggtgctgttcaaatgaagtcaccctgacgcacccaatcaccaaatacatcatga

SEQ ID NO: 398 - DNA, 4853 bp, Hepatitis C virus
tcgcccacaggacgtcaagttcccgggtggcggtcagatcgttggtggagtttacttgttgccgcgcaggggccctagattgggtgtgcgcgcgacgaggaagacttccgagcggtcgcaacctcgagtagacgtcagcctatccccaaggcacgtcggcccgagggcaggacctgggctcagcccgggtacccttggcccctctacggcaatgagggctgcggatgggcgggatggctcctgtctccccgtggtctcggcctagttggggccccacagacccccggcgtaggtcgcgcaatttgggtaaggtcatcgatacccttacgtgcggcttcgccgacctcatggggtacataccgctcgtcggcgccccccttggaggcgctgccaggccctggcgcacggcgtccgggttctggaagacggcgtgaactatgcaacagggaatcttcctggttgctctttctctatcttcctcctggccctgctctcttgcttgaccgtgcccgcttcggcctacaagtgcgcaactccacggggctttatcatgtcaccaacgactgccctaattcgagtattgtgtacgaggcggccgatgctatcctgcacactccggggtgtgtcccttgcgttcgcgagggtaacgtctcgaggtgctggtggcgatgacccccacggtggccactagggacggcaagctccccacaacgcagcttcgacgccacatcgatctgcttgtcgggagcgccaccctttgctcggccctctacgtgggggacctgtgcggtctgtctttcttgtcggtcagatgtttactttctctcccaggcgccactggacgacgcaagactgcaattgttccatgtaccccggccatataacgggtcaccgcatggcatgggatatgatgatgaactggtcccctacgcggcgttgatagtagctcagctgctccggatcccacaagccatcttggacatgatcgctggtgctcactggggagtcctggcgggcattgcgtacttttccatggtggggaactgggcgaaggtcctgtagtgctgctgttatttgccggcgtcgacgcgggaacccacgtcagcgggggagccgtcgcccgtggcgcagcttcaattgccgggttgtttaactcaggtgccaaacagaacatccagctgatcaacaccaacggcagtggcacatcaatagcacggccttgaactgcaatgatagccttaacaccggctggatagcagggcttttctactacaacaaattcaactcttcaggctgtcccgacaggttggccagctgccggcgcctaccgattttgcccagggctggggccctatcagtcacgccaacggaagtggccccgacgaacgcccttactgctggcactaccccccaagaccttgtggtattgtgccggcaaagagcgtgtgtggcccagtatattgcttccccccagccctgtggtggtggggacgaccgacaagtcgggcgcgcctacctacaactggggtgataatgatacggacgttttcgtccttaacaacactaggccaccgctgggcaattggttcggttgacctggatgaactcaactggattcaccaaagtgtgcggagcgcccccctgtgtcatcggaggggtgggcaataacaccttgcgctgccccactgattgtttccgcaagcatccggaagccacgtactctcggtgcggctctgtccctggattacacccaggtgcctggtcgactatccgtataggctgtggcattatccttgtaccatcaactacaccatcttcaaagtcaggatgtacgtgggaggggtcgagcacaggctggaagcgcctgcaactggacgcggggcgaacgttgtgatctggacgacagggacaggtccgagctcagcccgttgctgctgtccaccacgcagtggcagatccttccgtgttccttcacgaccctgccagccttgtccaccggcctctccacctccaccagaacattgtggacgtgcagtacttgtacggggtggggtcaagcatcgcgtcctgggccattaaatgggactacgtcgtcctcctcttccttttgcttgcagacgcgcgcgtctgtcctgcttgtggatgatgttactcatatcccaagcggaggcggctttggagaacctcgtagtactcaatgcagcatccctggccgggacacacggtcttgcatccttcctcgtgttcttctgctttgcgtggtatctgaaggtaggtgggtgcccggagcagtctacgccctctacgggatgtggcctctcctcctgctcctgttggcgttgccccagcgggcatacgcactggacacggaggtggccgcgtcgtgtggcggcgttgtcttgtcggggtaatggcgctgactctgtcaccatattacaagcactatatcggctggtgcttgtggtggcttcagtattttctgactagagcagaagcgcaactgcatgtgtgggttccccccctcaacgttcgagggggggcgatgccgtcatcttactcatgtgtgttgtacacccgaccttggtatttgacatcaccaagctactgctggccgtcttcggacccctttgggttctgcaagccagcctgcttaaggtgccctacttgtgcgcgttcaaggccttctccggctctgcgcgctagcgcggaaggtggtcggaggccattacgtgcaaatggtcatcatcaagttgggggcgcttactggcacttatgtctataaccatctcactcctcttcgggactggcgcacaacggcctccaagatctggccgtggctgtagagccagtcgtcttctcccgaatggaaaccaagctcatcacgtggggggcagacactgccgcgtgcggtgatatcatcaacggcttgcccgttccgcccgcagggggcaggagatactgctcggaccagccgatggaatggtctccaaggggtggaggttgctggcgcccatcacggcgtacgcccagcagacgaggggcctcctagggtgcataatcaccagcctgactggcgagacaaaaaccaagtggagggtgaagtccagattgtgtcaactgctgcccaaacttttctggcaacgtgcatcaatggggtatgctggactgtctaccatggggctggaacgaggaccattgcatccccaagggtcctgttatccagatgtataccaatgtggacaaagaccttgtgggctggcccgcccctcaaggttcccgctcattgacaccctgcacctgcggctcctcggacctctacttggtcacgaggcatgccgatgtcttcccgtgcgccggcgaggtgatagcaggggcagcctgctttcgccccggcccatttcctacttgaaaggctcctcggggggtccgctgttgtgccccgcggggcacgccgtgggcatattcagggcgcggtgtgcacccgtggagtggctaaggcggtggacttcatccctgtggagaacctagagacaaccatgaggtccccggtgtttacggacaactcctctccaccagcagtgccccagagcttccaggtggcccacctgcacctcccaccggcagcggcaagagcaccaaggtcccggctgcatacgcggctcagggctataaagtgctagtgctcaacccctccgttgctgcaacactgggctttggtgcttacatgtccaaggcccaggggtcgagcctaatatcaggaccggggtgagaacaattaccactggcagccccattacgtactccacctatggcaagttccttgccgacggcgggtgttcagggggcgcctatgacataataatttgtgatgagtgccacccacggatgccacatccatcttgggcatcggcactgtcctcgaccaagcagagactgcgggggcgagactggttgtgctcgccaccgctactcctccgggctctgtcactgtgccccatcctaacatgaggaggttgctctgtccaccaccggagaggtccctttttacggcaaggccatcccccttgaggtaatcaaaggggggagacatctcatcttctgtcactcaaagaagaagtgcgatgagctcgccgcaaagctggtcgcgtgggcgtcaatgccgtggcctactaccgcggtcttgacgtttctgtcatcccaaccagcggcgatgttgtcgtcgtggcgaccgacgctctcatgaccggctttaccggcgacttcgactcggtgatgactgcaacacgtgtgtcactcagacagtcgatttcagccttgaccctaccttcaccattgagacaaccacgctcccccaggatgctgtctcccgtactcaacgtcggggcaggactggcagggggaagccaggcatctacgatttgtggcaccgggagagcgcccctctggcatgttcgactcgtctgtcctctgcgagtgctatgacgcgggctgtgcttggtatgagctgacgcccgccgagactacagttaggctacgagcgtaatgaacaccccggggcttcccgtgtgccaggaccatcttgagttttgggagggcgtctttacgggcctcacccatatagatgcccattttctgtcccagacaaagcagagtggggagaaccttccttacctggtagcgtacaagccaccgtgtgcgctagggctcaagcccctcccccatcgtgggaccagatgtggaagtgtttgatccgcctcaaacccaccctccacgggccaacacccctgctatacagactgggtgctgttcaaatgaagtcaccctgacgcacccaatcaccaaatacatcatga

SEQ ID NO: 399 - DNA, 4853 bp, Hepatitis C virus; identical to SEQ ID NO: 398

SEQ ID NO: 400 - DNA, 4853 bp, Hepatitis C virus; identical to SEQ ID NO: 398

SEQ ID NO: 401 - DNA, 4853 bp, Hepatitis C virus; identical to SEQ ID NO: 398

SEQ ID NO: 402 - DNA, 4853 bp, Hepatitis C virus; identical to SEQ ID NO: 398

SEQ ID NO: 403 - DNA, 4853 bp, Hepatitis C virus; identical to SEQ ID NO: 398

SEQ ID NO: 404 - DNA, 4853 bp, Hepatitis C virus; identical to SEQ ID NO: 398

SEQ ID NO: 405 - DNA, 4853 bp, Hepatitis C virus; identical to SEQ ID NO: 398

SEQ ID NO: 406 - DNA, 4794 bp, Hepatitis C virus
tcgcccacaggacgtcaagttcccgggtggcggtcagatcgttggtggagtttacttgttgccgcgcaggggccctagattgggtgtgcgcgcgacgaggaagacttccgagcggtcgcaacctcgagtagacgtcagcctatccccaaggcacgtcggcccgagggcaggacctgggctcagcccgggtacccttggcccctctacggcaatgagggctgcggatgggcgggatggctcctgtctccccgtggtctcggcctagttggggccccacagacccccggcgtaggtcgcgcaatttgggtaaggtcatcgatacccttacgtgcggcttcgccgacctcatggggtacataccgctcgtcggcgccccccttggaggcgctgccaggccctggcgcacggcgtccgggttctggaagacggcgtgaactatgcaacagggaatcttcctggttgctctttctctatcttcctcctggccctgctctcttgcttgaccgtgcccgcttcggcctacaagtgcgcaactccacggggctttatcatgtcaccaacgactgccctaattcgagtattgtgtacgaggcggccgatgctatcctgcacactccggggtgtgtcccttgcgttcgcgagggtaacgtctcgaggtgctggtggcgatgacccccacggtggccactagggacggcaagctccccacaacgcagcttcgacgccacatcgatctgcttgtcgggagcgccaccctttgctcggccctctacgtgggggacctgtgcggtctgtctttcttgtcggtcagatgtttactttctctcccaggcgccactggacgacgcaagactgcaattgttccatgtaccccggccatataacgggtcaccgcatggcatgggatatgatgatgaactggtcccctacgcggcgttgatagtagctcagctgctccggatcccacaagccatcttggacatgatcgctggtgctcactggggagtcctggcgggcattgcgtacttttccatggtggggaactgggcgaaggtcctgtagtgctgctgttatttgccggcgtcgacgcgggaacccacgtcagcgggggagccgtcgcccgtggcgcagcttcaattgccgggttgtttaactcaggtgccaaacagaacatccagctgatcaacaccaacggcagtggcacatcaatagcacggccttgaactgcaatgatagccttaacaccggctggatagcagggcttttctactacaacaaattcaactcttcaggctgtcccgacaggttggccagctgccggcgcctaccgattttgcccagggctggggccctatcagtcacgccaacggaagtggccccgacgaacgcccttactgctggcactaccccccaagaccttgtggtattgtgccggcaaagagcgtgtgtggcccagtatattgcttccccccagccctgtggtggtggggacgaccgacaagtcgggcgcgcctacctacaactggggtgataatgatacggacgttttcgtccttaacaacactaggccaccgctgggcaattggttcggttgacctggatgaactcaactggattcaccaaagtgtgcggagcgcccccctgtgtcatcggaggggtgggcaataacaccttgcgctgccccactgattgtttccgcaagcatccggaagccacgtactctcggtgcggctctgtccctggattacacccaggtgcctggtcgactatccgtataggctgtggcattatccttgtaccatcaactacaccatcttcaaagtcaggatgtacgtgggaggggtcgagcacaggctggaagcgcctgcaactggacgcggggcgaacgttgtgatctggacgacagggacaggtccgagctcagcccgttgctgctgtccaccacgcagtggcagatccttccgtgttccttcacgaccctgccagccttgtccaccggcctctccacctccaccagaacattgtggacgtgcagtacttgtacggggtggggtcaagcatcgcgtcctgggccattaaatgggactacgtcgtcctcctcttccttttgcttgcagacgcgcgcgtctgtcctgcttgtggatgatgttactcatatcccaagcggaggcggctttggagaacctcgtagtactcaatgcagcatccctggccgggacacacggtcttgcatccttcctcgtgttcttctgctttgcgtggtatctgaaggtaggtgggtgcccggagcagtctacgccctctacgggatgtggcctctcctcctgctcctgttggcgttgccccagcgggcatacgcactggacacggaggtggccgcgtcgtgtggcggcgttgtcttgtcggggtaatggcgctgactctgtcaccatattacaagcactatatcggctggtgcttgtggtggcttcagtattttctgactagagcagaagcgcaactgcatgtgtgggttccccccctcaacgttcgagggggggcgatgccgtcatcttactcatgtgtgttgtacacccgaccttggtatttgacatcaccaagctactgctggccgtcttcggacccctttgggttctgcaagccagcctgcttaaggtgccctacttgtgcgcgttcaaggccttctccggctctgcgcgctagcgcggaaggtggtcggaggccattacgtgcaaatggtcatcatcaagttgggggcgcttactggcacttatgtctataaccatctcactcctcttcgggactggcgcacaacggcctccaagatctggccgtggctgtagagccagtcgtcttctcccgaatggaaaccaagctcatcacgtggggggcagacactgccgcgtgcggtgatatcatcaacggcttgcccgttccgcccgcagggggcaggagatactgctcggaccagccgatggaatggtctccaaggggtggaggttgctggcgcccatcacggcgtacgcccagcagacgaggggcctcctagggtgcataatcaccagcctgactggcgagacaaaaaccaagtggagggtgaagtccagattgtgtcaactgctgcccaaacttttctggcaacgtgcatcaatggggtatgctggactgtctaccatggggctggaacgaggaccattgcatccccaagggtcctgttatccagatgtataccaatgtggacaaagaccttgtgggctggcccgcccctcaaggttcccgctcattgacaccctgcacctgcggctcctcggacctctacttggtcacgaggcatgccgatgtcttcccgtgcgccggcgaggtgatagcaggggcagcctgctttcgccccggcccatttcctacttgaaaggctcctcggggggtccgctgttgtgccccgcggggcacgccgtgggcatattcagggcgcggtgtgcacccgtggagtggctacggacaactcctctccaccagcagtgccccagagcttccaggtggcccacctgcacgctcccaccggcagcggcaagagcaccaaggtcccggctgcatacgcggctcagggctataagtgctagtgctcaacccctccgttgctgcaacactgggctttggtgcttacatgtccaaggcccatggggtcgagcctaatatcaggaccggggtgagaacaattaccactggcagccccattactactccacctatggcaagttccttgccgacggcgggtgttcagggggcgcctatgacataataatttgtgatgagtgccactccacggatgccacatccatcttgggcatcggcactgtcctcgaccaagcagagactgcggggcgagactggttgtgctcgccaccgctactcctccgggctctgtcactgtgccccatcctaacatcgaggaggttgctctgtccaccaccggagaggtccctttttacggcaaggccatccccctgaggtaatcaaaggggggagacatctcatcttctgtcactcaaagaagaagtgcgatgagctcgccgcaaagctggtcgcgttgggcgtcaatgccgtggcctactaccgcggtcttgacgtttctgtcatcccaaccagcgcgatgttgtcgtcgtggcgaccgacgctctcatgaccggctttaccggcgacttcgactcggtgatagactgcaacacgtgtgtcactcagacagtcgatttcagccttgaccctaccttcaccatgagacaaccacgctcccccaggatgctgtctcccgtactcaacgtcggggcaggactggcagggggaagccaggcatctacagatttgtggcaccgggagagcgcccctctggcatgttcgactcgtctgtcctctgcgaggctatgacgcgggctgtgcttggtatgagctgacgcccgccgagactacagttaggctacgagcgtacatgaacaccccggggcttcccgtgtgccaggaccatcttgagttttgggagggcgtcttacgggcctcacccatatagatgcccattttctgtcccagacaaagcagagtggggagaaccttccttacctggtagcgtaccaagccaccgtgtgcgctagggctcaagcccctcccccatcgtgggaccagatgtggaaggtttgatccgcctcaaacccaccctccacgggccaacacccctgctatacagactgggtgctgttcagaatgaagtcaccctgacgcacccaatcaccaaatacatcatga

SEQ ID NO: 407 - DNA, 4853 bp, Hepatitis C virus; identical to SEQ ID NO: 398

SEQ ID NO: 408 - DNA, 4853 bp, Hepatitis C virus; identical to SEQ ID NO: 398

SEQ ID NO: 409 - DNA, 4853 bp, Hepatitis C virus; identical to SEQ ID NO: 398

SEQ ID NO: 410 - DNA, 4853 bp, Hepatitis C virus; identical to SEQ ID NO: 398

SEQ ID NO: 411 - DNA, 4853 bp, Hepatitis C virus
tcgcccacaggacgtcaagttcccgggtggcggtcagatcgttggtggagtttacttgttgccgcgcaggggccctagattgggtgtgcgcgcgacgaggaagacttccgagcggtcgcaacctcgagtagacgtcagcctatccccaaggcacgtcggcccgagggcaggacctgggctcagcccgggtacccttggcccctctacggcaatgagggctgcggatgggcgggatggctcctgtctccccgtggtctcggcctagttggggccccacagacccccggcgtaggtcgcgcaatttgggtaaggtcatcgatacccttacgtgcggcttcgccgacctcatggggtacataccgctcgtcggcgccccccttggaggcgctgccaggccctggcgcacggcgtccgggttctggaagacggcgtgaactatgcaacagggaatcttcctggttgctctttctctatcttcctcctggccctgctctcttgcttgaccgtgcccgcttcggcctacaagtgcgcaactccacggggctttatcatgtcaccaacgactgccctaattcgagtattgtgtacgaggcggccgatgctatcctgcacactccggggtgtgtcccttgcgttcgcgagggtaacgtctcgaggtgctggtggcgatgacccccacggtggccactagggacggcaagctccccacaacgcagcttcgacgccacatcgatctgcttgtcgggagcgccaccctttgctcggccctctacgtgggggacctgtgcggtctgtctttcttgtcggtcagatgtttactttctctcccaggcgccactggacgacgcaagactgcaattgttccatgtaccccggccatataacgggtcaccgcatggcatgggatatgatgatgaactggtcccctacgcggcgttgatagtagctcagctgctccggatcccacaagccatcttggacatgatcgctggtgctcactggggagtcctggcgggcattgcgtacttttccatggtggggaactgggcgaaggtcctgtagtgctgctgttatttgccggcgtcgacgcgggaacccacgtcagcgggggagccgtcgcccgtggcgcagcttcaattgccgggttgtttaactcaggtgccaaacagaacatccagctgatcaacaccaacggcagtggcacatcaatagcacggccttgaactgcaatgatagccttaacaccggctggatagcagggcttttctactacaacaaattcaactcttcaggctgtcccgacaggttggccagctgccggcgcctaccgattttgcccagggctggggccctatcagtcacgccaacggaagtggccccgacgaacgcccttactgctggcactaccccccaagaccttgtggtattgtgccggcaaagagcgtgtgtggcccagtatattgcttccccccagccctgtggtggtggggacgaccgacaagtcgggcgcgcctacctacaactggggtgataatgatacggacgttttcgtccttaacaacactaggccaccgctgggcaattggttcggttgacctggatgaactcaactggattcaccaaagtgtgcggagcgcccccctgtgtcatcggaggggtgggcaataacaccttgcgctgccccactgattgtttccgcaagcatccggaagccacgtactctcggtgcggctctgtccctggattacacccaggtgcctggtcgactatccgtataggctgtggcattatccttgtaccatcaactacaccatcttcaaagtcaggatgtacgtgggaggggtcgagcacaggctggaagcgcctgcaactggacgcggggcgaacgttgtgatctggacgacagggacaggtccgagctcagcccgttgctgctgtccaccacgcagtggcagatccttccgtgttccttcacgaccctgccagccttgtccaccggcctctccacctccaccagaacattgtggacgtgcagtacttgtacggggtggggtcaagcatcgcgtcctgggccattaaatgggactacgtcgtcctcctcttccttttgcttgcagacgcgcgcgtctgtcctgcttgtggatgatgttactcatatcccaagcggaggcggctttggagaacctcgtagtactcaatgcagcatccctggccgggacacacggtcttgcatccttcctcgtgttcttctgctttgcgtggtatctgaaggtaggtgggtgcccggagcagtctacgccctctacgggatgtggcctctcctcctgctcctgttggcgttgccccagcgggcatacgcactggacacggaggtggccgcgtcgtgtggcggcgttgtcttgtcggggtaatggcgctgactctgtcaccatattacaagcactatatcggctggtgcttgtggtggcttcagtattttctgactagagcagaagcgcaactgcatgtgtgggttccccccctcaacgttcgagggggggcgatgccgtcatcttactcatgtgtgttgtacacccgaccttggtattcgacatcaccaagctactgctggccgtcttcggacccctttgggttctgcaagccagcctgcttaaggtgccctacttgtgcgcgttcaaggccttctccggctctgcgcgctagcgcggaaggtggtcggaggccattacgtgcaaatggtcatcatcaagttgggggcgcttactggcacttatgtctataaccatctcactcctcttcgggactggcgcacaacggcctccaagatctggccgtggctgtagagccagtcgtcttctcccgaatggaaaccaagctcatcacgtggggggcagacactgccgcgtgcggtgatatcatcaacggcttgcccgttccgcccgcagggggcaggagatactgctcggaccagccgatggaatggtctccaaggggtggaggttgctggcgcccatcacggcgtacgcccagcagacgaggggcctcctagggtgcataatcaccagcctgactggcgagacaaaaaccaagtggagggtgaagtccagattgtgtcaactgctgcccaaacttttctggcaacgtgcatcaatggggtatgctggactgtctaccatggggctggaacgaggaccattgcatccccaagggtcctgttatccagatgtataccaatgtggacaaagaccttgtgggctggcccgcccctcaaggttcccgctcattgacaccctgcacctgcggctcctcggacctctacttggtcacgaggcatgccgatgtcttcccgtgcgccggcgaggtgatagcaggggcagcctgctttcgccccggcccatttcctacttgaaaggctcctcggggggtccgctgttgtgccccgcggggcacgccgtgggcatattcagggcgcggtgtgcacccgtggagtggctaaggcggtggacttcatccctgtggagaacctagagacaaccatgaggtccccggtgtttacggacaactcctctccaccagcagtgccccagagcttccaggtggcccacctgcacctcccaccggcagcggcaagagcaccaaggtcccggctgcatacgcggctcagggctataaagtgctagtgctcaacccctccgttgctgcaacactgggctttggtgcttacatgtccaaggcccaggggtcgagcctaatatcaggaccggggtgagaacaattaccactggcagccccattacgtactccacctatggcaagttccttgccgacggcgggtgttcagggggcgcctatgacataataatttgtgatgagtgccacccacggatgccacatccatcttgggcatcggcactgtcctcgaccaagcagagactgcgggggcgagactggttgtgctcgccaccgctactcctccgggctctgtcactgtgccccatcctaacatgaggaggttgctctgtccaccaccggagaggtccctttttacggcaaggccatcccccttgaggtaatcaaaggggggagacatctcatcttctgtcactcaaagaagaagtgcgatgagctcgccgcaaagctggtcgcgtgggcgtcaatgccgtggcctactaccgcggtcttgacgtttctgtcatcccaaccagcggcgatgttgtcgtcgtggcgaccgacgctctcatgaccggctttaccggcgacttcgactcggtgatgactgcaacacgtgtgtcactcagacagtcgatttcagccttgaccctaccttcaccattgagacaaccacgctcccccaggatgctgtctcccgtactcaacgtcggggcaggactggcagggggaagccaggcatctacgatttgtggcaccgggagagcgcccctctggcatgttcgactcgtctgtcctctgcgagtgctatgacgcgggctgtgcttggtatgagctgacgcccgccgagactacagttaggctacgagcgtaatgaacaccccggggcttcccgtgtgccaggaccatcttgagttttgggagggcgtctttacgggcctcacccatatagatgcccattttctgtcccagacaaagcagagtggggagaaccttccttacctggtagcgtacaagccaccgtgtgcgctagggctcaagcccctcccccatcgtgggaccagatgtggaagtgtttgatccgcctcaaacccaccctccacgggccaacacccctgctatacagactgggtgctgttcaaatgaagtcaccctgacgcacccaatcaccaaatacatcatga

SEQ ID NO: 412 - DNA, 4853 bp, Hepatitis C virus
tcgcccacaggacgtcaagttcccgggtggcggtcagatcgttggtggagtttacttgttgccgcgcaggggccctagattgggtgtgcgcgcgacgaggaagacttccgagcggtcgcaacctcgagtagacgtcagcctatccccaaggcacgtcggcccgagggcaggacctgggctcagcccgggtacccttggcccctctacggcaatgagggctgcgggtgggcgggatggctcctgtctccccgtggtctcggcctagttggggccccacagacccccggcgtaggtcgcgcaatttgggtaaggtcatcgatacccttacgtgcggcttcgccgacctcatggggtacataccgctcgtcggcgccccccttggaggcgctgccaggccctggcgcacggcgtccgggttctggaagacggcgtgaactatgcaacagggaatcttcctggttgctctttctctatcttcctcctggccctgctctcttgcttgaccgtgcccgcttcggcctacaagtgcgcaactccacggggctttatcatgtcaccaacgactgccctaattcgagtattgtgtacgaggcggccgatgctatcctgcacactccggggtgtgtcccttgcgttcgcgagggtaacgtctcgaggtgctggtggcgatgacccccacggtggccactagggacggcaagctccccacaacgcagcttcgacgccacatcgatctgcttgtcgggagcgccaccctttgctcggccctctacgtgggggacctgtgcggtctgtctttcttgtcggtcagatgtttactttctctcccaggcgccactggacgacgcaagactgcaattgttccatgtaccccggccatataacgggtcaccgcatggcatgggatatgatgatgaactggtcccctacgcggcgttgatagtagctcagctgctccggatcccacaagccatcttggacatgatcgctggtgctcactggggagtcctggcgggcattgcgtacttttccatggtggggaactgggcgaaggtcctgtagtgctgctgttatttgccggcgtcgacgcgggaacccacgtcagcgggggagccgtcgcccgtggcgcagcttcaattgccgggttgtttaactcaggtgccaaacagaacatccagctgatcaacaccaacggcagtggcacatcaatagcacggccttgaactgcaatgatagccttaacaccggctggatagcagggcttttctactacaacaaattcaactcttcaggctgtcccgacaggttggccagctgccggcgcctaccgattttgcccagggctggggccctatcagtcacgccaacggaagtggccccgacgaacgcccttactgctggcactaccccccaagaccttgtggtattgtgccggcaaagagcgtgtgtggcccagtatattgcttccccccagccctgtggtggtggggacgaccgacaagtcgggcgcgcctacctacaactggggtgataatgatacggacgttttcgtccttaacaacactaggccaccgctgggcaattggttcggttgacctggatgaactcaactggattcaccaaagtgtgcggagcgcccccctgtgtcatcggaggggtgggcaataacaccttgcgctgccccactgattgtttccgcaagcatccggaagccacgtactctcggtgcggctctgtccctggattacacccaggtgcctggtcgactatccgtataggctgtggcattatccttgtaccatcaactacaccatcttcaaagtcaggatgtacgtgggaggggtcgagcacaggctggaagcgcctgcaactggacgcggggcgaacgttgtgatctggacgacagggacaggtccgagctcagcccgttgctgctgtccaccacgcagtggcagatccttccgtgttccttcacgaccctgccagccttgtccaccggcctctccacctccaccagaacattgtggacgtgcagtacttgtacggggtggggtcaagcatcgcgtcctgggccattaaatgggactacgtcgtcctcctcttccttttgcttgcagacgcgcgcgtctgtcctgcttgtggatgatgttactcatatcccaagcggaggcggctttggagaacctcgtagtactcaatgcagcatccctggccgggacacacggtcttgcatccttcctcgtgttcttctgctttgcgtggtatctgaaggtaggtgggtgcccggagcagtctacgccctctacgggatgtggcctctcctcctgctcctgttggcgttgccccagcgggcatacgcactggacacggaggtggccgcgtcgtgtggcggcgttgtcttgtcggggtaatggcgctgactctgtcaccatattacaagcactatatcggctggtgcttgtggtggcttcagtattttctgactagagcagaagcgcaactgcatgtgtgggttccccccctcaacgttcgagggggggcgatgccgtcatcttactcatgtgtgttgtacacccgaccttggtatttgacatcaccaagctactgctggccgtcttcggacccctttgggttctgcaagccagcctgcttaaggtgccctacttgtgcgcgttcaaggccttctccggctctgcgcgctagcgcggaaggtggtcggaggccattacgtgcaaatggtcatcatcaagttgggggcgcttactggcacttatgtctataaccatctcactcctcttcgggactggcgcacaacggcctccaagatctggccgtggctgtagagccagtcgtcttctcccgaatggaaaccaagctcatcacgtggggggcagacactgccgcgtgcggtgatatcatcaacggcttgcccgttccgcccgcagggggcaggagatactgctcggaccagccgatggaatggtctccaaggggtggaggttgctggcgcccatcacggcgtacgcccagcagacgaggggcctcctagggtgcataatcaccagcctgactggcgagacaaaaaccaagtggagggtgaagtccagattgtgtcaactgctgcccaaacttttctggcaacgtgcatcaatggggtatgctggactgtctaccatggggctggaacgaggaccattgcatccccaagggtcctgttatccagatgtataccaatgtggacaaagaccttgtgggctggcccgcccctcaaggttcccgctcattgacaccctgcacctgcggctcctcggacctctacttggtcacgaggcatgccgatgtcttcccgtgcgccggcgaggtgatagcaggggcagcctgctttcgccccggcccatttcctacttgaaaggctcctcggggggtccgctgttgtgccccgcggggcacgccgtgggcatattcagggcgcggtgtgcacccgtggagtggctaaggcggtggacttcatccctgtggagaacctagagacaaccatgaggtccccggtgtttacggacaactcctctccaccagcagtgccccagagcttccaggtggcccacctgcacctcccaccggcagcggcaagagcaccaaggtcccggctgcatacgcggctcagggctataaagtgctagtgctcaacccctccgttgctgcaacactgggctttggtgcttacatgtccaaggcccaggggtcgagcctaatatcaggaccggggtgagaacaattaccactggcagccccattacgtactccacctatggcaagttccttgccgacggcgggtgttcagggggcgcctatgacataataatttgtgatgagtgccacccacggatgccacatccatcttgggcatcggcactgtcctcgaccaagcagagactgcgggggcgagactggttgtgctcgccaccgctactcctccgggctctgtcactgtgccccatcctaacatgaggaggttgctctgtccaccaccggagaggtccctttttacggcaaggccatcccccttgaggtaatcaaaggggggagacatctcatcttctgtcactcaaagaagaagtgcgatgagctcgccgcaaagctggtcgcgtgggcgtcaatgccgtggcctactaccgcggtcttgacgtttctgtcatcccaaccagcggcgatgttgtcgtcgtggcgaccgacgctctcatgaccggctttaccggcgacttcgactcggtgatgactgcaacacgtgtgtcactcagacagtcgatttcagccttgaccctaccttcaccattgagacaaccacgctcccccaggatgctgtctcccgtactcaacgtcggggcaggactggcagggggaagccaggcatctacgatttgtggcaccgggagagcgcccctctggcatgttcgactcgtctgtcctctgcgagtgctatgacgcgggctgtgcttggtatgagctgacgcccgccgagactacagttaggctacgagcgtaatgaacaccccggggcttcccgtgtgccaggaccatcttgagttttgggagggcgtctttacgggcctcacccatatagatgcccattttctgtcccagacaaagcagagtggggagaaccttccttacctggtagcgtacaagccaccgtgtgcgctagggctcaagcccctcccccatcgtgggaccagatgtggaagtgtttgatccgcctcaaacccaccctccacgggccaacacccctgctatacagactgggtgctgttcaaatgaagtcaccctgacgcacccaatcaccaaatacatcatga

SEQ ID NO: 413 - DNA, 4853 bp, Hepatitis C virus
tcgcccacaggacgtcaagttcccgggtggcggtcagatcgttggtggagtttacttgttgccgcgcaggggccctagattgggtgtgcgcgcgacgaggaagacttccgagcggtcgcaacctcgagtagacgtcagcctatccccaaggcacgtcggcccgagggcaggacctgggctcagcccgggtacccttggcccctctacggcaatgagggctgcggatgggcgggatggctcctgtctccccgtggtctcggcctagttggggccccacagacccccggcgtaggtcgcgcaatttgggtaaggtcatcgatacccttacgtgcggcttcgccgacctcatggggtacataccgctcgtcggcgccccccttggaggcgctgccaggccctggcgcacggcgtccgggttctggaagacggcgtgaactatgcaacagggaatcttcctggttgctctttctctatcttcctcctggccctgctctcttgcttgaccgtgcccgcttcggcctacaagtgcgcaactccacggggctttatcatgtcaccaacgactgccctaattcgagtattgtgtacaaggcggccgatgctatcctgcacactccggggtgtgtcccttgcgttcgcgagggtaacgtctcgaggtgctggtggcgatgacccccacggtggccactagggacggcaagctccccacaacgcagcttcgacgccacatcgatctgcttgtcgggagcgccaccctttgctcggccctctacgtgggggacctgtgcggtctgtctttcttgtcggtcagatgtttactttctctcccaggcgccactggacgacgcaagactgcaattgttccatgtaccccggccatataacgggtcaccgcatggcatgggatatgatgatgaactggtcccctacgcggcgttgatagtagctcagctgctccggatcccacaagccatcttggacatgatcgctggtgctcactggggagtcctggcgggcattgcgtacttttccatggtggggaactgggcgaaggtcctgtagtgctgctgttatttgccggcgtcgacgcgggaacccacgtcagcgggggagccgtcgcccgtggcgcagcttcaattgccgggttgtttaactcaggtgccaaacagaacatccagctgatcaacaccaacggcagtggcacatcaatagcacggccttgaactgcaatgatagccttaacaccggctggatagcagggcttttctactacaacaaattcaactcttcaggctgtcccgataggttggccagctgccggcgcctaccgattttgcccagggctggggccctatcagtcacgccaacggaagtggccccgacgaacgcccttactgctggcactaccccccaagaccttgtggtattgtgccggcaaagagcgtgtgtggcccagtatattgcttccccccagccctgtggtggtggggacgaccgacaagtcgggcgcgcctacctacaactggggtgataatgatacggacgttttcgtccttaacaacactaggccaccgctgggcaattggttcggttgacctggatgaactcaactggattcaccaaagtgtgcggagcgcccccctgtgtcatcggaggggtgggcaataacaccttgcgctgccccactgattgtttccgcaagcatccggaagccacgtactctcggtgcggctctgtccctggattacacccaggtgcctggtcgactatccgtataggctgtggcattatccttgtaccatcaactacaccatcttcaaagtcaggatgtacgtgggaggggtcgagcacaggctggaagcgcctgcaactggacgcggggcgaacgttgtgatctggacgacagggacaggtccgagctcagcccgttgctgctgtccaccacgcagtggcagatccttccgtgttccttcacgaccctgccagccttgtccaccggcctctccacctccaccagaacattgtggacgtgcagtacttgtacggggtggggtcaagcatcgcgtcctgggccattaaatgggactacgtcgtcctcctcttccttttgcttgcagacgcgcgcgtctgtcctgcttgtggatgatgttactcatatcccaagcggaggcggctttggagaacctcgtagtactcaatgcagcatccctggccgggacacacggtcttgcatccttcctcgtgttcttctgctttgcgtggtatctgaaggtaggtgggtgcccggagcagtctacgccctctacgggatgtggcctctcctcctgctcctgttggcgttgccccagcgggcatacgcactggacacggaggtggccgcgtcgtgtggcggcgttgtcttgtcggggtaatggcgctgactctgtcaccatattacaagcactatatcggctggtgcttgtggtggcttcagtattttctgactagagcagaagcgcaactgcatgtgtgggttccccccctcaacgttcgagggggggcgatgccgtcatcttactcatgtgtgttgtacacccgaccttggtatttgacatcaccaagctactgctggccgtcttcggacccctttgggttctgcaagccagcctgcttaaggtgccctacttgtgcgcgttcaaggccttctccggctctgcgcgctagcgcggaaggtggtcggaggccattacgtgcaaatggtcatcatcaagttgggggcgcttactggcacttatgtctataaccatctcactcctcttcgggactggcgcacaacggcctccaagatctggccgtggctgtagagccagtcgtcttctcccgaatggaaaccaagctcatcacgtggggggcagacactgccgcgtgcggtgatatcatcaacggcttgcccgttccgcccgcagggggcaggagatactgctcggaccagccgatggaatggtctccaaggggtggaggttgctggcgcccatcacggcgtacgcccagcagacgaggggcctcctagggtgcataatcaccagcctgactggcgagacaaaaaccaagtggagggtgaagtccagattgtgtcaactgctgcccaaacttttctggcaacgtgcatcaatggggtatgctggactgtctaccatggggctggaacgaggaccattgcatccccaagggtcctgttatccagatgtataccaatgtggacaaagaccttgtgggctggcccgcccctcaaggttcccgctcattgacaccctgcacctgcggctcctcggacctctacttggtcacgaggcatgccgatgtcttcccgtgcgccggcgaggtgatagcaggggcagcctgctttcgccccggcccatttcctacttgaaaggctcctcggggggtccgctgttgtgccccgcggggcacgccgtgggcatattcagggcgcggtgtgcacccgtggagtggctaaggcggtggacttcatccctgtggagaacctagagacaaccatgaggtccccggtgtttacggacaactcctctccaccagcagtgccccagagcttccaggtggcccacctgcacctcccaccggcagcggcaagagcaccaaggtcccggctgcatacgcggctcagggctataaagtgctagtgctcaacccctccgttgctgcaacactgggctttggtgcttacatgtccaaggcccaggggtcgagcctaatatcaggaccggggtgagaacaattaccactggcagccccattacgtactccacctatggcaagttccttgccgacggcgggtgttcagggggcgcctatgacataataatttgtgatgagtgccacccacggatgccacatccatcttgggcatcggcactgtcctcgaccaagcagagactgcgggggcgagactggttgtgctcgccaccgctactcctccgggctctgtcactgtgccccatcctaacatgaggaggttgctctgtccaccaccggagaggtccctttttacggcaaggccatcccccttgaggtaatcaaaggggggagacatctcatcttctgtcactcaaagaagaagtgcgatgagctcgccgcaaagctggtcgcgtgggcgtcaatgccgtggcctactaccgcggtcttgacgtttctgtcatcccaaccagcggcgatgttgtcgtcgtggcgaccgacgctctcatgaccggctttaccggcgacttcgactcggtgatgactgcaacacgtgtgtcactcagacagtcgatttcagccttgaccctaccttcaccattgagacaaccacgctcccccaggatgctgtctcccgtactcaacgtcggggcaggactggcagggggaagccaggcatctacgatttgtggcaccgggagagcgcccctctggcatgttcgactcgtctgtcctctgcgagtgctatgacgcgggctgtgcttggtatgagctgacgcccgccgagactacagttaggctacgagcgtaatgaacaccccggggcttcccgtgtgccaggaccatcttgagttttgggagggcgtctttacgggcctcacccatatagatgcccattttctgtcccagacaaagcagagtggggagaaccttccttacctggtagcgtacaagccaccgtgtgcgctagggctcaagcccctcccccatcgtgggaccagatgtggaagtgtttgatccgcctcaaacccaccctccacgggccaacacccctgctatacagactgggtgctgttcaaatgaagtcaccctgacgcacccaatcaccaaatacatcatga

SEQ ID NO: 414 - DNA, 4853 bp, Hepatitis C virus
tcgcccacaggacgtcaagttcccgggtggcggtcagatcgttggtggagtttacttgttgccgcgcaggggccctagattgggtgtgcgcgcgacgaggaagacttccgagcggtcgcaacctcgagtagacgtcagcctatccccaaggcacgtcggcccgagggcaggacctgggctcagcccgggtacccttggcccctctacggcaatgagggctgcggatgggcgggatggctcctgtctccccgtggtctcggcctagttggggccccacagacccccggcgtaggtcgcgcaatttgggtaaggtcatcgatacccttacgtgcggcttcgccgacctcatggggtacataccgctcgtcggcgccccccttggaggcgctgccaggccctggcgcacggcgtccgggttctggaagacggcgtgaactatgcaacagggaatcttcctggttgctctttctctatcttcctcctggccctgctctcttgcttgaccgtgcccgcttcggcctacaagtgcgcaactccacggggctttatcatgtcaccaacgactgccctaattcgagtattgtgtacgaggcggccgatgctatcctgcacactccggggtgtgtcccttgcgttcgcgagggtaacgtctcgaggtgctggtggcgatgacccccacggtggccactagggacggcaagctccccacaacgcagcttcgacgccacatcgatctgcttgtcgggagcgccaccctttgctcggccctctacgtgggggacctgtgcggtctgtctttcttgtcggtcagatgtttactttctctcccaggcgccactggacgacgcaagactgcaattgttccatgtaccccggccatataacgggtcaccgcatggcatgggatatgatgatgaactggtcccctacgcggcgttgatagtagctcagctgctccggatcccacaagccatcttggacatgatcgctggtgctcactggggagtcctggcgggcattgcgtacttttccatggtggggaactgggcgaaggtcctgtagtgctgctgttatttgccggcgtcgacgcgggaacccacgtcagcgggggagccgtcgcccgtggcgcagcttcaattgccgggttgtttaactcaggtgccaaacagaacatccagctgatcaacaccaacggcagtggcacatcaatagcacggccttgaactgcaatgatagccttaacaccggctggatagcagggcttttctactacaacaaatttaactcttcaggctgtcccgacaggttggccagctgccggcgcctaccgattttgcccagggctggggccctatcagtcacgccaacggaagtggccccgacgaacgcccttactgctggcactaccccccaagaccttgtggtattgtgccggcaaagagcgtgtgtggcccagtatattgcttccccccagccctgtggtggtggggacgaccgacaagtcgggcgcgcctacctacaactggggtgataatgatacggacgttttcgtccttaacaacactaggccaccgctgggcaattggttcggttgacctggatgaactcaactggattcaccaaagtgtgcggagcgcccccctgtgtcatcggaggggtgggcaataacaccttgcgctgccccactgattgtttccgcaagcatccggaagccacgtactctcggtgcggctctgtccctggattacacccaggtgcctggtcgactatccgtataggctgtggcattatccttgtaccatcaactacaccatcttcaaagtcaggatgtacgtgggaggggtcgagcacaggctggaagcgcctgcaactggacgcggggcgaacgttgtgatctggacgacagggacaggtccgagctcagcccgttgctgctgtccaccacgcagtggcagatccttccgtgttccttcacgaccctgccagccttgtccaccggcctctccacctccaccagaacattgtggacgtgcagtacttgtacggggtggggtcaagcatcgcgtcctgggccattaaatgggactacgtcgtcctcctcttccttttgcttgcagacgcgcgcgtctgtcctgcttgtggatgatgttactcatatcccaagcggaggcggctttggagaacctcgtagtactcaatgcagcatccctggccgggacacacggtcttgcatccttcctcgtgttcttctgctttgcgtggtatctgaaggtaggtgggtgcccggagcagtctacgccctctacgggatgtggcctctcctcctgctcctgttggcgttgccccagcgggcatacgcactggacacggaggtggccgcgtcgtgtggcggcgttgtcttgtcggggtaatggcgctgactctgtcaccatattacaagcactatatcggctggtgcttgtggtggcttcagtattttctgactagagcagaagcgcaactgcatgtgtgggttccccccctcaacgttcgagggggggcgatgccgtcatcttactcatgtgtgttgtacacccgaccttggtatttgacatcaccaagctactgctggccgtcttcggacccctttgggttctgcaagccagcctgcttaaggtgccctacttgtgcgcgttcaaggccttctccggctctgcgcgctagcgcggaaggtggtcggaggccattacgtgcaaatggtcatcatcaagttgggggcgcttactggcacttatgtctataaccatctcactcctcttcgggactggcgcacaacggcctccaagatctggccgtggctgtagagccagtcgtcttctcccgaatggaaaccaagctcatcacgtggggggcagacactgccgcgtgcggtgatatcatcaacggcttgcccgttccgcccgcagggggcaggagatactgctcggaccagccgatggaatggtctccaaggggtggaggttgctggcgcccatcacggcgtacgcccagcagacgaggggcctcctagggtgcataatcaccagcctgactggcgagacaaaaaccaagtggagggtgaagtccagattgtgtcaactgctgcccaaacttttctggcaacgtgcatcaatggggtatgctggactgtctaccatggggctggaacgaggaccattgcatccccaagggtcctgttatccagatgtataccaatgtggacaaagaccttgtgggctggcccgcccctcaaggttcccgctcattgacaccctgcacctgcggctcctcggacctctacttggtcacgaggcatgccgatgtcttcccgtgcgccggcgaggtgatagcaggggcagcctgctttcgccccggcccatttcctacttgaaaggctcctcggggggtccgctgttgtgccccgcggggcacgccgtgggcatattcagggcgcggtgtgcacccgtggagtggctaaggcggtggacttcatccctgtggagaacctagagacaaccatgaggtccccggtgtttacggacaactcctctccaccagcagtgccccagagcttccaggtggcccacctgcacctcccaccggcagcggcaagagcaccaaggtcccggctgcatacgcggctcagggctataaagtgctagtgctcaacccctccgttgctgcaacactgggctttggtgcttacatgtccaaggcccaggggtcgagcctaatatcaggaccggggtgagaacaattaccactggcagccccattacgtactccacctatggcaagttccttgccgacggcgggtgttcagggggcgcctatgacataataatttgtgatgagtgccatccacggatgccacatccatcttgggcatcggcactgtcctcgaccaagcagagactgcgggggcgagactggttgtgctcgccaccgctactcctccgggctctgtcactgtgccccatcctaacatgaggaggttgctctgtccaccaccggagaggtccctttttacggcaaggccatcccccttgaggtaatcaaaggggggagacatctcatcttctgtcactcaaagaagaagtgcgatgagctcgccgcaaagctggtcgcgtgggcgtcaatgccgtggcctactaccgcggtcttgacgtttctgtcatcccaaccagcggcgatgttgtcgtcgtggcgaccgacgctctcatgaccggctttaccggcgacttcgactcggtgatgactgcaacacgtgtgtcactcagacagtcgatttcagccttgaccctaccttcaccattgagacaaccacgctcccccaggatgctgtctcccgtactcaacgtcggggcaggactggcagggggaagccaggcatctacgatttgtggcaccgggagagcgcccctctggcatgttcgactcgtctgtcctctgcgagtgctatgacgcgggctgtgcttggtatgagctgacgcccgccgagactacagttaggctacgagcgtaatgaacaccccggggcttcccgtgtgccaggaccatcttgagttttgggagggcgtctttacgggcctcacccatatagatgcccattttctgtcccagacaaagcagagtggggagaaccttccttacctggtagcgtacaagccaccgtgtgcgctagggctcaagcccctcccccatcgtgggaccagatgtggaagtgtttgatccgcctcaaacccaccctccacgggccaacacccctgctatacagactgggtgctgttcaaatgaagtcaccctgacgcacccaatcaccaaatacatcatga

SEQ ID NO: 415 - DNA, 4853 bp, Hepatitis C virus; identical to SEQ ID NO: 398

SEQ ID NO: 416 - DNA, 4853 bp, Hepatitis C virus
tcgcccacaggacgtcaagttcccgggtggcggtcagatcgttggtggagtttacttgttgccgcgcaggggccctagattgggtgtgcgcgcgacgaggaagacttccgagcggtcgcaacctcgagtagacgtcagcctatccccaaggcacgtcggcccgagggcaggacctgggctcagcccgggtacccttggcccctctacggcaatgagggctgcggatgggcgggatggctcctgtctccccgtggtctcggcctagttggggccccacagacccccggcgtaggtcgcgcaatttgggtaaggtcatcgatacccttacgtgcggcttcgccgacctcatggggtacataccgctcgtcggcgccccccttggaggcgctgccaggccctggcgcacggcgtccgggttctggaagacggcgtgaactatgcaacagggaatcttcctggttgctctttctctatcttcctcctggccctgctctcttgcttgaccgtgcccgcttcggcctacaagtgcgcaactccacggggctttatcatgtcaccaacgactgccctaattcgagtattgtgtacgaggcggccgatgctatcctgcacactccggggtgtgtcccttgcgttcgcgagggtaacgtctcgaggtgctggtggcgatgacccccacggtggccactagggacggcaagctccccacaacgcagcttcgacgccacatcgatctgcttgtcgggagcgccaccctttgctcggccctctacgtgggggacctgtgcggtctgtctttcttgtcggtcagatgtttactttctctcccaggcgccactggacgacgcaagactgcaattgttccatgtaccccggccatataacgggtcaccgcatggcatgggatatgatgatgaactggtcccctacgcggcgttgatagtagctcagctgctccggatcccacaagccatcttggacatgatcgctggtgctcactggggagtcctggcgggcattgcgtacttttccatggtggggaactgggcgaaggtcctgtagtgctgctgttatttgccggcgtcgacgcgggaacccacgtcagcgggggagccgtcgcccgtggcgcagcttcaattgccgggttgtttaactcaggtgccaaacagaacatccagctgatcaacaccaacggcagtggcacatcaatagcacggccttgaactgcaatgatagccttaacaccggctggatagcagggcttttctactacaacaaattcaactcttcaggctgtcccgacaggttggccagctgccggcgcctaccgattttgcccagggctggggccctatcagtcacgccaacggaagtggccccgacgaacgcccttactgctggcactaccccccaagaccttgtggtattgtgccggcaaagagcgtgtgtggcccagtatattgcttccccccagccctgtggtggtggggacgaccgacaagtcgggcgcgcctacctacaactggggtgataatgatacggacgttttcgtccttaacaacactaggccaccgctgggcaattggttcggttgacctggatgaactcaactggattcaccaaagtgtgcggagcgcccccctgtgtcatcggaggggtgggcaataacaccttgcgctgccccactgattgtttccgcaagcatccggaagccacgtactctcggtgcggctctgtccctggattacacccaggtgcctggtcgactatccgtataggctgtggcattatccttgtaccatcaactacaccatcttcaaagtcaggatgtacgtgggaggggtcgagcacaggctggaagcgcctgcaactggacgcggggcgaacgttgtgatctggacgacagggacaggtccgagctcagcccgttgctgctgtccaccacgcagtggcagatccttccgtgttccttcacgaccctgccagccttgtccaccggcctctccacctccaccagaacattgtggacgtgcagtacttgtacggggtggggtcaagcatcgcgtcctgggccattaaatgggactacgtcgtcctcctcttccttttgcttgcagacgcgcgcgtctgtcctgcttgtggatgatgttactcatatcccaagcggaggcggctttggagaacctcgtagtactcaatgcagcatccctggccgggacacacggtcttgcatccttcctcgtgttcttctgctttgcgtggtatctgaaggtaggtgggtgcccggagcagtctacgccctctacgggatgtggcctctcctcctgctcctgttggcgttgccccagcgggcatacgcactggacacggaggtggccgcgtcgtgtggcggcgttgtcttgtcggggtaatggcgctgactctgtcaccatattacaagcactatatcggctggtgcttgtggtggcttcagtattttctgactagagcagaagcgcaactgcatgtgtgggttccccccctcaacgttcgagggggggcgatgccgtcatcttactcatgtgtgttgtacacccgaccttggtatttgacatcaccaagctactgctggccgtcttcggacccctttgggttctgcaagccagcctgcttaaggtgccctacttgtgcgcgttcaaggccttctccggctctgcgcgctagcgcggaaggtggtcggaggccattacgtgcaaatggtcatcatcaagttgggggcgcttactggcacttatgtctataaccatctcactcctcttcgggactggcgcacaacggcctccaagatctggccgtggctgtagagccagtcgtcttctcccgaatggaaaccaagctcatcacgtggggggcagacactgccgcgtgcggtgatatcatcaacggcttgcccgttccgcccgcagggggcaggagatactgctcggaccagccgatggaatggtctccaaggggtggaggttgctggcgcccatcacggcgtacgcccagcagacgaggggcctcctagggtgcataatcaccagcctgactggcgagacaaaaaccaagtggagggtgaagtccagattgtgtcaactgctgcccaaacttttctggcaacgtgcatcaatggggtatgctggactgtctaccatggggctggaacgaggaccattgcatccccaagggtcctgttatccagatgtataccaatgtggacaaagaccttgtgggctggcccgcccctcaaggttcccgctcattgacaccctgcacctgcggctcctcggacctctacttggtcacgaggcatgccgatgtcttcccgtgcgccggcgaggtgacagcaggggcagcctgctttcgccccggcccatttcctacttgaaaggctcctcggggggtccgctgttgtgccccgcggggcacgccgtgggcatattcagggcgcggtgtgcacccgtggagtggctaaggcggtggacttcatccctgtggagaacctagagacaaccatgaggtccccggtgtttacggacaactcctctccaccagcagtgccccagagcttccaggtggcccacctgcacctcccaccggcagcggcaagagcaccaaggtcccggctgcatacgcggctcagggctataaagtgctagtgctcaacccctccgttgctgcaacactgggctttggtgcttacatgtccaaggcccaggggtcgagcctaatatcaggaccggggtgagaacaattaccactggcagccccattacgtactccacctatggcaagttccttgccgacggcgggtgttcagggggcgcctatgacataataatttgtgatgagtgccacccacggatgccacatccatcttgggcatcggcactgtcctcgaccaagcagagactgcgggggcgagactggttgtgctcgccaccgctactcctccgggctctgtcactgtgccccatcctaacatgaggaggttgctctgtccaccaccggagaggtccctttttacggcaaggccatcccccttgaggtaatcaaaggggggagacatctcatcttctgtcactcaaagaagaagtgcgatgagctcgccgcaaagctggtcgcgtgggcgtcaatgccgtggcctactaccgcggtcttgacgtttctgtcatcccaaccagcggcgatgttgtcgtcgtggcgaccgacgctctcatgaccggctttaccggcgacttcgactcggtgatgactgcaacacgtgtgtcactcagacagtcgatttcagccttgaccctaccttcaccattgagacaaccacgctcccccaggatgctgtctcccgtactcaacgtcggggcaggactggcagggggaagccaggcatctacgatttgtggcaccgggagagcgcccctctggcatgttcgactcgtctgtcctctgcgagtgctatgacgcgggctgtgcttggtatgagctgacgcccgccgagactacagttaggctacgagcgtaatgaacaccccggggcttcccgtgtgccaggaccatcttgagttttgggagggcgtctttacgggcctcacccatatagatgcccattttctgtcccagacaaagcagagtggggagaaccttccttacctggtagcgtacaagccaccgtgtgcgctagggctcaagcccctcccccatcgtgggaccagatgtggaagtgtttgatccgcctcaaacccaccctccacgggccaacacccctgctatacagactgggtgctgttcaaatgaagtcaccctgacgcacccaatcaccaaatacatcatga

SEQ ID NO: 417 - DNA, 4853 bp, Hepatitis C virus
ccgcccacaggacgtcaagttcccgggtggcggtcagatcgttggtggagtttacttgttgccgcgcaggggccctagattgggtgtgcgcgcgacgaggaagacttccgagcggtcgcaacctcgtgtagacgtcagcctatccccaaggcacgtcggcccgagggcaggacctgggctcagcccgggtacccttggcccctctatggcaatgagggctgcgggtgggcgggatggctcctgtctccccgtggtctcggcctagttggggccccacagacccccggcgtaggtcgcgcaatttgggtaaggtcatcgatacccttacgtgcggcttcgccgacctcatggggtacataccgctcgtcggcgcccctcttggaggcgctgccaggccctggcgcacggcgtccgggttctggaagacggcgtgaactatgcaacagggaaccttcctggttgctctttctctatcttcctcctagccctgctctcttgcttgaccgtgcccgcttcggcctacaagtgcgcaactccacggggctttatcatgtcaccaacgactgccctaattcgagtattgtgtacgaggcggccgatgctatcctgcacactccggggtgtgtcccttgcgttcgcgagggtaacgtctcgaggtgctggtggcgatgacccccacggtggccactagggacggcaagctccccacaacgcagcttcgacgccacatcgatctgcttgtcgggagcgccaccctttgctcggccctctacgtgggggacctgtgcggtctgtctttcttgtcggtcagatgtttactttctctcccaggcgccactggacaacgcaagactgcaattgttccatgtaccccggccatataacgggtcaccgcatggcatgggatatgatgatgaactggtcccctacgcggcattgatagtggctcagctgctccggatcccacaagccatcttggacatgatcgctggtgctcactggggagtcctggcgggcattgcgtatttctccatggtggggaactgggcgaaggtcctgtagtgctgctgttatttgccggcgtcgacgcgggaacccacgtcagcgggggatccatcgcccgtggcgcagcttcaattgccgggttgtttaaccaaggtgccagacagaacatccagctgatcaacaccaacggcagtggcacatcaatagcacggccttgaattgcaatgatagccttaacaccggctggatagcagggcttttctattacaacaaattcaactcttcaggctgtcccgagaggttggccagctgccggcgcctaccgattttgcccagggctggggccctatcagttatgccaacggaagtggccccgacgaacgcccttactgctggcactaccctccaagaccttgtggtattgtgccggcaaagagcgtgtgtggcccagtatattgcttccccccagccctgtggtggtggggacgaccgacaagtcgggcgcgcctacctacaactggggtgataatgatacggacgttttcgtccttaacaacactaggccaccgctgggcaattggttcggttgacctggatgaactcaactggattcaccaaagtgtgcggagcgcccccctgtgtcatcggaggggtgggcaataacaccttgcgctgccccactgattgtttccgcaagcatccggaagccacgtactctcggtgcggctctgtccctggattacacccaggtgcctggtcgactatccgtataggctgtggcattatccttgtaccatcaactacaccatcttcaaagtcaggatgtacgtgggaggggtcgagcacaggctggaagcgcctgcaattggacgcggggcgaacgttgtgatctggacgacagggacaggtccgagctcagcccgttgctgctgtccaccacgcagtggcaggtccttccgtgttccttcacgaccctgccagccttgtccaccggcctctccacctccaccagaacattgtggacgtgcagtacttgtacggggtggggtcaagcatcgcgtcctgggccattaagtgggactacgtcgtcctcctgttccttttgcttgcagacgcgcgcgtctgtcctgcttgtggatgatgttactcatatcccaagcggaggcggctttggagaacctcgtagtactcaatgcagcatccctggccgggacacacggtcttgcatccttcctcgtgttcttctgctttgcatggtatctgaaggtaggtgggtgcccggagcagtctacgccctctacgggatgtggcctctcctcctgctcctgttggcgttgccccagcgggcatacgcactggacacggaggtggccgcgtcgtgtggcggcgttgtcttgtcggggtaatggcgctgactctgtcaccatattataagcactatatcagctggtgcttgtggtggcttcagtattttctgactagagcagaagcgcaactgcatgtgtgggttccccccctcaacgttcgagggggggcgacgccgtcatcttactcatgtgtgctgtacacccgaccttggtatttgacatcaccaagctactgctggccgtcctcggacccctttgggttctgcaagccagtctgcttaaggtgccctacttgtgcgcgttcaaggccttctccggctctgcgcgttagcgcggaaggtggtcggaggccattacgtgcaaatggtcatcatcaagttgggggcgcttactggcacttatgtctataaccatctcactcctcttcgggactggcgcacaacggccttcaagatctggccgtggctgtagagccagtcgtcttctcccgaatggaaaccaagctcatcacgtggggggcagacactgccgcgtgcggtgatatcatcaacggcttgcccgttccgcccgcagggggcaggagatactgctcggaccagccgacggaatggtctccaaggggtggaggttgctggcgcccatcacggcgtacgcccagcagacgaggggcctcctagggtgcataatcaccagcctgactggcgagacaaaaaccaagtggagggtgaagtccagattgtgtcaactgctgcccaaactttcctggcaacgtgcatcaatggggtatgctggactgtctaccatggggctggaacgaggaccattgcatccccaagggtcctgttatccagatgtataccaatgtggacaaggacctcgtgggctggcccgcccctcagggttcccgctcattgacaccctgcacctgcggctcctcggacctttacttggtcacgaggcatgccgatgtcttcccgtgcgccggcgaggtgatagcaggggcagcctgctttcgccccggcccatttcctacttgaaaggctcctcggggggtccgctgttgtgccccgcgggacacgccgtaggcatattcagggcgcggtgtgcacccgtggagtggctaaggcggtggactttatccctgtagagaacctagagacaaccatgaggtccccggtgtttacggacaactcctctccaccagcagtgccccagagcttccaggtggcccacctgcacctcccaccggcagcggcaagagcaccaaggtcccggctgcatacgcggctcagggctataaagtgctagtgctcaacccctccgttgctgcaacactgggctttggtgcttacatgtccaaggcccaggggtcgagcctaatatcaggaccggggtgagaacaattaccactggcagccccattacgtactccacctacggcaagttccttgccgacggcgggtgttcagggggtgcttatgacataataatttgtgatgagtgccacccacggatgccacatccatcttgggcatcggcactgtcctcgaccaagcagagactgcgggggcgagactggttgtgctcgccaccgctactcctccgggctctgtcactgtgccccatcctaacatgaggaggttgctctgtccaccaccggagaggtccctttttacggcaaggccatcccccttgaagtaatcaaaggggggagacacctcatcttctgtcactcaaagaagaagtgcgacgagctcgccgcaaagctggttgcgtgggcgtcaatgccgtggcctactaccgcggtcttgacgtttctgtcatcccgaccagcggcgatgttgtcgtcgtggcaaccgacgctctcatgaccggctttaccggcgacttcgactcggtgatgactgtaacacgtgtgtcacccagacagtcgatttcagccttgaccctaccttcaccattgagacaaccacgctcccccaggatgctgtctcccgtactcaacgtcggggcaggactggcagggggaagccaggcatctacgatttgtggcaccgggagagcgcccctccggcatgttcgactcgtccgtcctctgtgagtgctatgacgcgggctgtgcttggtatgagctgacgcccgccgagactacagttaggctacgagcgtaatgaacaccccggggcttcccgtgtgccaggaccatcttgagttttgggagggcgtctttacgggcctcacccatatagatgcccattttctgtcccagacaaagcagagtggggagaaccttccttacctggtagcgtacaagccaccgtgtgcgctagggctcaagcccctcccccatcgtgggaccagatgtggaagtgtttaatccgcctcaaacccaccctccacgggccaacacccctgctatacagactgggtgctgttcaaatgaaatcaccctgacacacccaatcaccaaatacatcatga

SEQ ID NO: 418 - DNA, 4873 bp, Hepatitis C virus
tcgcccacaggacgtcaagttcccgggtggcggtcagatcgttggtggagtttacttgttaccgcgcaggggccctagattgggtgtgcgcgcgacgaggaagacttccgagcggtcgcaacctcgagtagacgtcagcctatccccaaggcgcgtcggcccgagggcaggacctgggctcagcccgggtacccttggcccctctatggcaatgagggctgcgggtgggcgggatggctcctgtccccccgtggtctcggcctagctggggccctacagacccccggcgtaggtcgcgcaacttgggtaaggtcatcgataccctcacgtgcggcttcgccgacctcatggggtacattccgctcgtcggcgcgcctcttggaggcgccgccaggccctggcgcatggtgtccgggttctggaggacggcgtgaactatgcaacagggaaccttcctggttgctctttctctatcttccttttggccctgctctcttgcctgactgtacccgcgtcggcctacaagttcgcaactcctcggggctttatcatgtcaccaatgattgccctaactcgagtattgtgtacgagacggccgacgccattctacactctccggggtgtgtcccttgcgtccgcgagggtaacgcctcgaagtgctggtgccggtggcccccacagtggccaccaaggacggcaaactccccacgacgcagcttcgacgtcacatcgatctgcttgtcgggagcgccaccctctgctcggccctctatgtgggggacttgtgcggtctgtcttccttgtcggtcaactgttcactttctcccccagacgccactggacaacgcaagactgcaactgttccatctaccccggccatataacgggccaccgcatggcatgggatatgatgatgaattggtctcctacacagcgctggtaatggctcaactgctcagagtcccgcaagctgtcatggacatgatcgctggagcccactggggagtcctagcgggcatagcgtatttctccatggtggggaactgggcaaaggtcttttggtgctgttgttgtttgccggcgtcgacgcgagcactcgcaccatcggggggtctgctgctgcgaccacgtccggattcgccaagctcttcgctgctggctcccgccagaatgtccagctgatcaacaccaacggaagtggcacatcaatcgcacggccttgaactgtaatgcgagtctcgacactggctgggtagcggggctcttctattaccacaaattcaactcttcgggctgccccgagaggatggccagctgtagacccctgccgatttcgaccagggctggggccctatcagctacgccaacgcaagcggcaccgaccaccccccctactgctggcactaccccccaaagccttgcggtatcgtgccggcacagaacgtatgtggcccagtatattgcttcctcccagccctgtggtggtgggaacgaccgacaagttgggcgtgcccacctacaactggggtagcaatgacacggacgtcttcgtccttaacaacaccaggccaccgttgggcaattggttcggttgacctggatggactcatatggatataccaaagtgtgcggagcgcccccttgtgtcatcggaggggtaggcaataacaccttgcactgccccactgactgtttccgcaagcatccagaagccacatactctcggtgtggctccgtccctggatcacgcccaggtgcctggtccactactcttacaggctttggcattatccttgtactgtcaactacaccctgttcaaagtcaggatgtacgtgggaggggtcgagcacaggctggaggtgcttgcaactggacgcggggcgaacgttgcgatctggacgacagggacaggtccgagctcagcccgctgctgctgtccaccacacagtggcaggttcttccgtgttctttcacgaccttgccagccttgactaccggcctctccacctccaccagaacatcgtggatgtgcaatatttgtacggggtggggtcaagcattgtgtcctgggccatcaagtgggagtacgtcatcctcttgtttctcctgcttgcagacgcgcgcatttgtcctgcttgtggatgatgctactcatatcccaggtggaggcagctttggagaacctcgtgctgctcaacgcggcgtctctgaccggggcgcacggtcttgtgtccttcctcgtgtttttctgctttgcatggtatctgaaggtaggtgggtgcccggagcggcctacgccctctacgggatgtggcctctcctcctgcttctgttggcgttgccccaacgggcatacgcactagacacggaagtggccgcgtcgtgtggtggcgttgtattgtcgggttaatggtgctgactctgtcaccgcactacaagcgctatatcagctggtgcttatggtggctccaatatttcctgactagagtggaagcgcaactgcacgtatgggtcccccccctcaacgtccgaggaggcgcgacgctgtcatcttgctcatgtgtgttatacacccggccttggtatttgacatcaccaagctgctgctggccgtcttcggacccctttggattcttcaaaccagtctgctcaaagtgccctacttgtgcgcgttcagggccttctccggctctgcgcgctagcgcgcaagatggccggaggccattacgtgcaaatggccatcatcaaggtgggggcgcttactggcacctacatctataaccatcttactcctcttcgggattggcgcacaacagcctacgagatctggccgtggctgtagagccagtcgtcttttcccagatggagactaagctcatcacctggggggcggacaccgccgcctgcggtgacatcatcaacggcttgcccgttctgcccgtaggggccgagagatactgctcggaccggccgacggagcggtctccaaggggtggaggttgctagcgcccatcacggcgtatgcccagcagacaaggggccttttgggatgtataattaccagcctgaccggcgggacaaaaaccaggtggagggtgaggttcagattgtgtctactgctgcccagactttcctggcaacctgcatcaacggggtgtgctggactgtctaccacggggccgggacaaggaccatcgcgtccccaagggtcccgttatccagatgtataccaatgtagaccaagacctcgtaggctggcccgctccctatggtgctcgctcattgacaccctgcacttgcggctcctcggacctttacctggtcacgaggcacgccgatgtcttcccgtacgccggcggggtgatagcaggggcagcctgctttcgcctcgacccatctcttacttgaaaggctcctcggggggcccactactgtgccccgcgggacacgccgtaggcatattcagggcgcggtgtgcacccgtggagtggctaaggcggtggactttatccccgtagagagcctagagacaaccatgaggtccccggtgttcacagacaactcctccccaccagcggtgccccagagcttccaggtggcccacctgcacctcccaccggcagcggtaagagcaccaaggtcccggccgcatacgcggctcagggctacaaggtgctggtgctcaacccctccgttgctgcaacactgggctttggcgcctacatgtccaaggcccagggattgatccgaacatcaggactggggtgaggacaattactactggcagccccatcacgtactccacctacggcaagttcctcgctgacggcgggtgctcagggggtgcttatgacataataatttgtgacgagtgccacccacggatgcaacatccatcttgggcatcggcactgtccttgaccaagcagagacagcgggggcgaggctggttgtgctcgccaccgctacccctccgggctccgtcactgtgccccactctaacatgaggaggttgctctgtccactaccggagagatccccttttacggcaaggctatcccccttgaggcaatcaagggggggagacatctcattttctgccactcaaggaaaaagtgcgacgagctcgccgcaaggctggtcgcgtgggcatcaatgctgtggcctactaccgcggccttgacgtgtccgtcatcccgaccagcggcgacgttgtcgtcgtggcaactgatgccctcatgaccggcttttccggcgacttcgactcggtgatgactgcaacacgtgtgtcacccagacagtcgacttcagccttgaccctaccttcaccattgagacaaccacgcttcctcaggacgctgtttcccgcacccaacgtcggggcaggactggcagggggaagccaggcatctatgatttgtggcaccgggagagcgcccctccggcatgttcgactcgtccgtcctctgtgagtgctatgacgcaggctgtgcttggtatgagctcacacccgccgagaccacagttaggttacgagcgtaatgaacaccccggggcttcccgtgtgccaggaccatcttgaattttgggagggcgtcttcacaggtctcacccatatagacgcccacttcttatctcagacaaagcagagtggggaaaactttccttacctggtagcgtacaagccaccgtgtgcgctagagctcaagctccccccccatcgtgggaccagatgtggaagtgcttgatccgcctcaagcccacccttcatgggccaacacctctgctatacagactgggcgctgttcaaatgaaatcaccctgacgcacccgatcaccaagtacatcatgacatgcatgtcggctgacctg

SEQ ID NO: 419 - DNA, 4874 bp, Hepatitis C virus
tcgcccacaggacgtcaagttcccgggtggcggtcagatcgttggtggagtttacttgttaccgcgcaggggccctagattgggtgtgcgcgcgacgaggaagacttccgagcggtcgcaacctcgagtagacgtcagcctatccccaaggcgcgtcggcccgagggcaggacctgggctcagcccgggtacccttggcccctctatggcaatgagggctgcgggtgggcgggatggctcctgtccccccgtggtctcggcctagctggggccctacagacccccggcgtaggtcgcgcaatttgggtaaggtcatcgataccctcacgtgcggcttcgccgacctcatggggtacattccgctcgtcggcgcgcctcttggaggcgccgccaggccctggcgcatggtgtccgggttctggaggacggcgtgaactatgcaacagggaaccttcctggttgctctttctctatcttccttttggccctgctctcttgcctgactgtacccgcgtcggcctacaagttcgcaactcctcggggctttatcatgtcaccaatgattgccctaactcgagtattgtgtacgagacggccgacgccattctacactctccggggtgtgtcccttgcgtccgcgagggtaacgcctcgaagtgctggtgccggtggcccccacagtggccaccaaggacggcaaactccccacgacgcagcttcgacgtcacatcgatctgcttgtcgggagcgccaccctctgctcggccctctatgtgggggacttgtgcggtctgtcttccttgtcggtcaactgttcactttctcccccagacgccactggacaacgcaagactgcaactgttccatctaccccggccatataacgggccaccgcatggcatgggatatgatgatgaattggtctcctacacagcgctggtaatggctcaactgctcagagtcccgcaagctgtcatggacatgatcgctggagcccactggggagtcctagcgggcatagcgtatttctccatggtggggaactgggcaaaggtcttttggtgctgttgttgtttgccggcgtcgacgcgagcactcgcaccatcggggggtctgctgctgcgaccacgtccggattcgccaagctcttcgctgctggctcccgccagaatgtccagctgatcaacaccaacggaagtggcacatcaatcgcacggccttgaactgtaatgcgagtctcgacactggctgggtagcggggctcttctattaccacaaattcaactcttcgggctgccccgagaggatggccagctgtagacccctgccgatttcgaccagggctggggccctatcagctacgccaacgcaagcggcaccgaccaccccccctactgctggcactaccccccaaagccttgcggtatcgtgccggcacagaacgtatgtggcccagtatattgcttcctcccagccctgtggtggtgggaacgaccgacaagttgggcgtgcccacctacaactggggtagcaatgacacggacgtcttcgtccttaacaacaccaggccaccgttgggcaattggttcggttgacctggatggactcatatggatataccaaagtgtgcggagcgcccccttgtgtcatcggaggggtaggcaataacaccttgcactgccccactgactgtttccgcaagcatccagaagccacatactctcggtgtggctccgtccctggatcacgcccaggtgcctggtccactactcttacaggctttggcattatccttgtactgtcaactacaccctgttcaaagtcaggatgtacgtgggaggggtcgagcacaggctggaggtgcttgcaactggacgcggggcgaacgttgcgatctggacgacagggacaggtccgagctcagcccgctgctgctgtccaccacacagtggcaggttcttccgtgttctttcacgaccttgccagccttgactaccggcctctccacctccaccagaacatcgtggatgtgcaatatttgtacggggtggggtcaagcattgtgtcctgggccatcaagtgggagtacgtcatcctcttgtttctcctgcttgcagacgcgcgcatttgtcctgcttgtggatgatgctactcatatcccaggtggaggcagctttggagaacctcgtgctgctcaacgcggcgtctctgaccggggcgcacggtcttgtgtccttcctcgtgtttttctgctttgcatggtatctgaaggtaggtgggtgcccggagcggcctacgccctctacgggatgtggcctctcctcctgcttctgttggcgttgccccaacgggcatacgcactagacacggaagtggccgcgtcgtgtggtggcgttgtattgtcgggttaatggtgctgactctgtcaccgcactacaagcgctatatcagctggtgcttatggtggctccaatatttcctgactagagtggaagcgcaactgcacgtatgggtcccccccctcaacgtccgaggaggcgcgacgctgtcatcttgctcatgtgtgttatacacccggccttggtatttgacatcaccaagctgctgctggccgtcttcggacccctttggattcttcaaaccagtctgctcaaagtgccctacttgtgcgcgttcagggccttctccggctctgcgcgctagcgcgcaagatggccggaggccattacgtgcaaatggccatcatcaaggtgggggcgcttactggcacctacatctataaccatcttactcctcttcgggattggcgcacaacagcctacgagatctggccgtggctgtagagccagtcgtcttttcccagatggagactaagctcatcacctggggggcggacaccgccgcctgcggtgacatcatcaacggcttgcccgttctgcccgtaggggccgagagatactgctcggaccggccgacggagcggtctccaaggggtggaggttgctagcgcccatcacggcgtatgcccagcagacaaggggccttttgggatgtataattaccagcctgaccggcgggacaaaaaccaggtggagggtgaggttcagattgtgtctactgctgcccagactttcctggcaacctgcatcaacggggtgtgctggactgtctaccacggggccgggacaaggaccatcgcgtccccaagggtcccgttatccagatgtataccaatgtagaccaagacctcgtaggctggcccgctccctatggtgctcgctcattgacaccctgcacttgcggctcctcggacctttacctggtcacgaggcacgccgatgtcttcccgtacgccggcggggtgatagcaggggcagcctgctttcgcctcgacccatctcttacttgaaaggctcctcggggggcccactactgtgccccgcgggacacgccgtaggcatattcagggcgcggtgtgcacccgtggagtggctaaggcggtggactttatccccgtagagagcctagagacaaccatgaggtccccggtgttcacagacaactcctccccaccagcggtgccccagagcttccaggtggcccacctgcacctcccaccggcagcggtaagagcaccaaggtcccggccgcatacgcggctcagggctacaaggtgctggtgctcaacccctccgttgctgcaacactgggctttggcgcctacatgtccaaggcccagggattgatccgaacatcaggactggggtgaggacaattactactggcagccccatcacgtactccacctacggcaagttcctcgctgacggcgggtgctcagggggtgcttatgacataataatttgtgacgagtgccacccacggatgcaacatccatcttgggcatcggcactgtccttgaccaagcagagacagcgggggcgaggctggttgtgctcgccaccgctacccctccgggctccgtcactgtgccccactctaacatgaggaggttgctctgtccactaccggagagatccccttttacggcaaggctatcccccttgaggcaatcaagggggggagacatctcattttctgccactcaaggaaaaagtgcgacgagctcgccgcaaggctggtcgcgtgggcatcaatgctgtggcctactaccgcggccttgacgtgtccgtcatcccgaccagcggcgacgttgtcgtcgtggcaactgatgccctcatgaccggcttttccggcgacttcgactcggtgatgactgcaacacgtgtgtcacccagacagtcgacttcagccttgaccctaccttcaccattgagacaaccacgcttcctcaggacgctgtttcccgcacccaacgtcggggcaggactggcagggggaagccaggcatctatgatttgtggcaccgggagagcgcccctccggcatgttcgactcgtccgtcctctgtgagtgctatgacgcaggctgtgcttggtatgagctcacacccgccgagaccacagttaggttacgagcgtaatgaacaccccggggcttcccgtgtgccaggaccatcttgaattttgggagggcgtcttcacaggtctcacccatatagacgcccacttcttatctcagacaaagcagagtggggaaaactttccttacctggtagcgtacaagccaccgtgtgcgctagagctcaagctccccccccatcgtgggaccagatgtggaagtgcttgatccgcctcaagcccacccttcatgggccaacacctctgctatacagactgggcgctgttcaaatgaaatcaccctgacgcacccgatcaccaagtacatcatgacatgcatgtcggctgacctgg

SEQ ID NO: 420 - DNA, 4710 bp, Hepatitis C virus
tcgcccacaggacgtcaagttcccgggtggcggtcagatcgttggtggagtttacttgttaccgcgcaggggccctagattgggtgtgcgcgcgacgaggaagacttccgagcggtcgcaacctcgagtagacgtcagcctatccccaaggcgcgtcggcccgagggcaggacctgggctcagcccgggtacccttggcccctctatggcaatgagggctgcgggtgggcgggatggctcctgtccccccgtggtctcggcctagctggggccctacagacccccggcgtaggtcgcgcaatttgggtaaggtcatcgataccctcacgtgcggcttcgccgacctcatggggtacattccgctcgtcggcgcgcctcttggaggcgccgccaggccctggcgcatggtgtccgggttctggaggacggcgtgaactatgcaacagggaaccttcctggttgctctttctctatcttccttttggccctgctctcttgcctgactgtacccgcgtcggcctacaagttcgcaactcctcggggctttatcatgtcaccaatgattgccctaactcgagtattgtgtacgagacggccgacgccattctacactctccggggtgtgtcccttgcgtccgcgagggtaacgcctcgaagtgctggtgccggtggcccccacagtggccaccaaggacggcaaactccccacgacgcagcttcgacgtcacatcgatctgcttgtcgggagcgccaccctctgctcggccctctatgtgggggacttgtgcggtctgtcttccttgtcggtcaactgttcactttctcccccagacgccactggacaacgcaagactgcaactgttccatctaccccggccatataacgggccaccgcatggcatgggatatgatgatgaattggtctcctacacagcgctggtaatggctcaactgctcagagtcccgcaagctgtcatggacatgatcgctggagcccactggggagtcctagcgggcatagcgtatttctccatggtggggaactgggcaaaggtcttttggtgctgttgttgtttgccggcgtcgacgcgagcactcgcaccatcggggggtctgctgctgcgaccacgtccggattcgccaagctcttcgctgctggctcccgccagaatgtccagctgatcaacaccaacggaagtggcacatcaatcgcacggccttgaactgtaatgcgagtctcgacactggctgggtagcggggctcttctattaccacaaattcaactcttcgggctgccccgagaggatggccagctgtagacccctgccgatttcgaccagggctggggccctatcagctacgccaacgcaagcggcaccgaccaccccccctactgctggcactaccccccaaagccttgcggtatcgtgccggcacagaacgtatgtggcccagtatattgcttcctcccagccctgtggtggtgggaacgaccgacaagttgggcgtgcccacctacaactggggtagcaatgacacggacgtcttcgtccttaacaacaccaggccaccgttgggcaattggttcggttgacctggatggactcatatggatataccaaagtgtgcggagcgcccccttgtgtcatcggaggggtaggcaataacaccttgcactgccccactgactgtttccgcaagcatccagaagccacatactctcggtgtggctccgtccctggatcacgcccaggtgcctggtccactactcttacaggctttggcattatccttgtactgtcaactacaccctgttcaaagtcaggatgtacgtgggaggggtcgagcacaggctggaggtgcttgcaactggacgcggggcgaacgttgcgatctggacgacagggacaggtccgagctcagcccgctgctgctgtccaccacacagtggcaggttcttccgtgttctttcacgaccttgccagccttgactaccggcctctccacctccaccagaacatcgtggatgtgcaatatttgtacggggtggggtcaagcattgtgtcctgggccatcaagtgggagtacgtcatcctcttgtttctcctgcttgcagacgcgcgcatttgtcctgcttgtggatgatgctactcatatcccaggtggaggcagctttggagaacctcgtgctgctcaacgcggcgtctctgaccggggcgcacggtcttgtgtccttcctcgtgtttttctgctttgcatggtatctgaaggtaggtgggtgcccggagcggcctacgccctctacgggatgtggcctctcctcctgcttctgttggcgttgccccaacgggcatacgcactagacacggaagtggccgcgtcgtgtggtggcgttgtattgtcgggttaatggtgctgactctgtcaccgcactacaagcgctatatcagctggtgcttatggtggctccaatatttcctgactagagtggaagcgcaactgcacgtatgggtcccccccctcaacgtccgaggaggcgcgacgctgtcatcttgctcatgtgtgttatacacccggccttggtatttgacatcaccaagctgctgctggccgtcttcggacccctttggattcttcaaaccagtctgctcaaagtgccctacttgtgcgcgttcagggccttctccggctctgcgcgctagcgcgcaagatggccggaggccattacgtgcaaatggccatcatcaaggtgggggcgcttactggcacctacatctataaccatcttactcctcttcgggattggcgcacaacagcctacgagatctggccgtggctgtagagccagtcgtcttttcccagatggagactaagctcatcacctggggggcggacaccgccgcctgcggtgacatcatcaacggcttgcccgttctgcccgtaggggccgagagatactgctcggaccggccgacggagcggtctccaaggggtggaggttgctagcgcccatcacggcgtatgcccagcagacaaggggccttttgggatgtataattaccagcctgaccggcgggacaaaaaccaggtggagggtgaggttcagattgtgtctactgctgcccagactttcctggcaacctgcatcaacggggtgtgctggactgtctaccacggggccgggacaaggaccatcgcgtccccaagggtcccgttatccagatgtataccaatgtagaccaagacctcgtaggctggcccgctccctatggtgctcgctcattgacaccctgcacttgcggctcctcggacctttacctggtcacgaggcacgccgatgtcttcccgtacgccggcggggtgatagcaggggcagcctgctttcgcctcgacccatctcttacttgaaaggctcctcggggggcccactactgtgccccgcgggacacgccgtaggcatattcagggcgcggtgtgcacccgtggagtggctaaggcggtggactttatccccgtagagagcctagagacaaccatgaggtccccggtgttcacagacaactcctccccaccagcggtgccccagagcttccaggtggcccacctgcacctcccaccggcagcggtaagagcaccaaggtcccggccgcatacgcggctcagggctacaaggtgctggtgctcaacccctccgttgctgcaacactgggctttggcgcctacatgtccaaggcccagggattgatccgaacatcaggactggggtgaggacaattactactggcagccccatcacgtactccacctacggcaagttcctcgctgacggcgggtgctcagggggtgcttatgacataataatttgtgacgagtgccacccacggatgcaacatccatcttgggcatcggcactgtccttgaccaagcagagacagcgggggcgaggctggttgtgctcgccaccgctacccctccgggctccgtcactgtgccccactctaacatgaggaggttgctctgtccactaccggagagatccccttttacggcaaggctatcccccttgaggcaatcaagggggggagacatctcattttctgccactcaaggaaaaagtgcgacgagctcgccgcaaggctggtcgcgtgggcatcaatgctgtggcctactaccgcggccttgacgtgtccgtcatcccgaccagcggcgacgttgtcgtcgtggcaactgatgccctcatgaccggcttttccggcgacttcgactcggtgatgactgcaacacgtgtgtcacccagacagtcgacttcagccttgaccctaccttcaccattgagacaaccacgcttcctcaggacgctgtttcccgcacccaacgtcggggcaggactggcagggggaagccaggcatctatgatttgtggcaccgggagagcgcccctccggcatgttcgactcgtccgtcctctgtgagtgctatgacgcaggctgtgcttggtatgagctcacacccgccgagaccacagttaggttacgagcgtaatgaacaccccggggcttcccgtgtgccaggaccatcttgaattttgggagggcgtcttcacaggtctcacccatatagacgcccacttcttatctcagacaaagcagagtggggaaaactttccttacctggtagcgtacaagccaccgtgtgcgctagagctcaag

SEQ ID NO: 421 - DNA, 4872 bp, Hepatitis C virus
tcgcccacaggacgtcaagttcccgggtggcggtcagatcgttggtggagtttacttgttaccgcgcaggggccctagattgggtgtgcgcgcgacgaggaagacttccgagcggtcgcaacctcgagtagacgtcagcctatccccaaggcgcgtcggcccgagggcaggacctgggctcagcccgggtacccttggcccctctatggcaatgagggctgcgggtgggcgggatggctcctgtccccccgtggtctcggcctagctggggccctacagacccccggcgtaggtcgcgcaatttgggtaaggtcatcgataccctcacgtgcggcttcgccgacctcatggggtacattccgctcgtcggcgcgcctcttggaggcgccgccaggccctggcgcatggtgtccgggttctggaggacggcgtgaactatgcaacagggaaccttcctggttgctctttctctatcttccttttggccctgctctcttgcctgactgtacccgcgtcggcctacaagttcgcaactcctcggggctttatcatgtcaccaatgattgccctaactcgagtattgtgtacgagacggccgacgccattctacactctccggggtgtgtcccttgcgtccgcgagggtaacgcctcgaagtgctggtgccggtggcccccacagtggccaccaaggacggcaaactccccacgacgcagcttcgacgtcacatcgatctgcttgtcgggagcgccaccctctgctcggccctctatgtgggggacttgtgcggtctgtcttccttgtcggtcaactgttcactttctcccccagacgccactggacaacgcaagactgcaactgttccatctaccccggccatataacgggccaccgcatggcatgggatatgatgatgaattggtctcctacacagcgctggtaatggctcaactgctcagagtcccgcaagctgtcatggacatgatcgctggagcccactggggagtcctagcgggcatagcgtatttctccatggtggggaactgggcaaaggtcttttggtgctgttgttgtttgccggcgtcgacgcgagcactcgcaccatcggggggtctgctgctgcgaccacgtccggattcgccaagctcttcgctgctggctcccgccagaatgtccagctgatcaacaccaacggaagtggcacatcaatcgcacggccttgaactgtaatgcgagtctcgacactggctgggtagcggggctcttctattaccacaaattcaactcttcgggctgccccgagaggatggccagctgtagacccctgccgatttcgaccagggctggggccctatcagctacgccaacgcaagcggcaccgaccaccccccctactgctggcactaccccccaaagccttgcggtatcgtgccggcacagaacgtatgtggcccagtatattgcttcctcccagccctgtggtggtgggaacgaccgacaagttgggcgtgcccacctacaactggggtagcaatgacacggacgtcttcgtccttaacaacaccaggccaccgttgggcaattggttcggttgacctggatggactcatatggatataccaaagtgtgcggagcgcccccttgtgtcatcggaggggtaggcaataacaccttgcactgccccactgactgtttccgcaagcatccagaagccacatactctcggtgtggctccgtccctggatcacgcccaggtgcctggtccactactcttacaggctttggcattatccttgtactgtcaactacaccctgttcaaagtcaggatgtacgtgggaggggtcgagcacaggctggaggtgcttgcaactggacgcggggcgaacgttgcgatctggacgacagggacaggtccgagctcagcccgctgctgctgtccaccacacagtggcaggttcttccgtgttctttcacgaccttgccagccttgactaccggcctctccacctccaccagaacatcgtggatgtgcaatatttgtacggggtggggtcaagcattgtgtcctgggccatcaagtgggagtacgtcatcctcttgtttctcctgcttgcagacgcgcgcatttgtcctgcttgtggatgatgctactcatatcccaggtggaggcagctttggagaacctcgtgctgctcaacgcggcgtctctgaccggggcgcacggtcttgtgtccttcctcgtgtttttctgctttgcatggtatctgaaggtaggtgggtgcccggagcggcctacgccctctacgggatgtggcctctcctcctgcttctgttggcgttgccccaacgggcatacgcactagacacggaagtggccgcgtcgtgtggtggcgttgtattgtcgggttaatggtgctgactctgtcaccgcactacaagcgctatatcagctggtgcttatggtggctccaatatttcctgactagagtggaagcgcaactgcacgtatgggtcccccccctcaacgtccgaggaggcgcgacgctgtcatcttgctcatgtgtgttatacacccggccttggtatttgacatcaccaagctgctgctggccgtcttcggacccctttggattcttcaaaccagtctgctcaaagtgccctacttgtgcgcgttcagggccttctccggctctgcgcgctagcgcgcaagatggccggaggccattacgtgcaaatggccatcatcaaggtgggggcgcttactggcacctacatctataaccatcttactcctcttcgggattggcgcacaacagcctacgagatctggccgtggctgtagagccagtcgtcttttcccagatggagactaagctcatcacctggggggcggacaccgccgcctgcggtgacatcatcaacggcttgcccgttctgcccgtaggggccgagagatactgctcggaccggccgacggagcggtctccaaggggtggaggttgctagcgcccatcacggcgtatgcccagcagacaaggggccttttgggatgtataattaccagcctgaccggcgggacaaaaaccaggtggagggtgaggttcagattgtgtctactgctgcccagactttcctggcaacctgcatcaacggggtgtgctggactgtctaccacggggccgggacaaggaccatcgcgtccccaagggtcccgttatccagatgtataccaatgtagaccaagacctcgtaggctggcccgctccctatggtgctcgctcattgacaccctgcacttgcggctcctcggacctttacctggtcacgaggcacgccgatgtcttcccgtacgccggcggggtgatagcaggggcagcctgctttcgcctcgacccatctcttacttgaaaggctcctcggggggcccactactgtgccccgcgggacacgccgtaggcatattcagggcgcggtgtgcacccgtggagtggctaaggcggtggactttatccccgtagagagcctagagacaaccatgaggtccccggtgttcacagacaactcctccccaccagcggtgccccagagcttccaggtggcccacctgcacctcccaccggcagcggtaagagcaccaaggtcccggccgcatacgcggctcagggctacaaggtgctggtgctcaacccctccgttgctgcaacactgggctttggcgcctacatgtccaaggcccagggattgatccgaacatcaggactggggtgaggacaattactactggcagccccatcacgtactccacctacggcaagttcctcgctgacggcgggtgctcagggggtgcttatgacataataatttgtgacgagtgccacccacggatgcaacatccatcttgggcatcggcactgtccttgaccaagcagagacagcgggggcgaggctggttgtgctcgccaccgctacccctccgggctccgtcactgtgccccactctaacatgaggaggttgctctgtccactaccggagagatccccttttacggcaaggctatcccccttgaggcaatcaagggggggagacatctcattttctgccactcaaggaaaaagtgcgacgagctcgccgcaaggctggtcgcgtgggcatcaatgctgtggcctactaccgcggccttgacgtgtccgtcatcccgaccagcggcgacgttgtcgtcgtggcaactgatgccctcatgaccggcttttccggcgacttcgactcggtgatgactgcaacacgtgtgtcacccagacagtcgacttcagccttgaccctaccttcaccattgagacaaccacgcttcctcaggacgctgtttcccgcacccaacgtcggggcaggactggcagggggaagccaggcatctatgatttgtggcaccgggagagcgcccctccggcatgttcgactcgtccgtcctctgtgagtgctatgacgcaggctgtgcttggtatgagctcacacccgccgagaccacagttaggttacgagcgtaatgaacaccccggggcttcccgtgtgccaggaccatcttgaattttgggagggcgtcttcacaggtctcacccatatagacgcccacttcttatctcagacaaagcagagtggggaaaactttccttacctggtagcgtacaagccaccgtgtgcgctagagctcaagctccccccccatcgtgggaccagatgtggaagtgcttgatccgcctcaagcccacccttcatgggccaacacctctgctatacagactgggcgctgttcaaatgaaatcaccctgacgcacccgatcaccaagtacatcatgacatgcatgtcggctgacct

SEQ ID NO: 422 - DNA, 4873 bp, Hepatitis C virus
tcgcccacaggacgtcaagttcccgggtggcggtcagatcgttggtggagtttacttgttaccgcgcaggggccctagattgggtgtgcgcgcgacgaggaagacttccgagcggtcgcaacctcgagtagacgtcagcctatccccaaggcgcgtcggcccgagggcaggacctgggctcagcccgggtacccttggcccctctatggcaatgagggctgcgggtgggcgggatggctcctgtccccccgtggtctcggcctagctggggccctacagacccccggcgtaggtcgcgcaatttgggtaaggtcatcgataccctcacgtgcggcttcgccgacctcatggggtacattccgctcgtcggcgcgcctcttggaggcgccgccaggccctggcgcatggtgtccgggttctggaggacggcgtgaactatgcaacagggaaccttcctggttgctctttctctatcttccttttggccctgctctcttgcctgactgtacccgcgtcggcctacaagttcgcaactcctcggggctttatcatgtcaccaatgattgccctaactcgagtattgtgtacgagacggccgacgccattctacactctccggggtgtgtcccttgcgtccgcgagggtaacgcctcgaagtgctggtgccggtggcccccacagtggccaccaaggacggcaaactccccacgacgcagcttcgacgtcacatcgatctgcttgtcgggagcgccaccctctgctcggccctctatgtgggggacttgtgcggtctgtcttccttgtcggtcaactgttcactttctcccccagacgccactggacaacgcaagactgcaactgttccatctaccccggccatataacgggccaccgcatggcatgggatatgatgatgaattggtctcctacacagcgctggtaatggctcaactgctcagagtcccgcaagctgtcatggacatgatcgctggagcccactggggagtcctagcgggcatagcgtatttctccatggtggggaactgggcaaaggtcttttggtgctgttgttgtttgccggcgtcgacgcgagcactcgcaccatcggggggtctgctgctgcgaccacgtccggattcgccaagctcttcgctgctggctcccgccagaatgtccagctgatcaacaccaacggaagtggcacatcaatcgcacggccttgaactgtaatgcgagtctcgacactggctgggtagcggggctcttctattaccacaaattcaactcttcgggctgccccgagaggatggccagctgtagacccctgccgatttcgaccagggctggggccctatcagctacgccaacgcaagcggcaccgaccacccccccctactgctggcactaccccccaaagccttgcggtatcgtgccggcacagaacgtatgtggcccagtatattgcttactcccagccctgtggtggtgggaacgaccgacaagttgggcgtgcccacctacaactggggtagcaatgacacggacgtcttcgtccttaacaacaccaggccaccgttgggcaattggttcggttcacctggatggactcatatggatataccaaagtgtgcggagcgcccccttgtgtcatcggaggggtaggcaataacaccttgcactgccccactgactgtttccgcaagcatccagaagccacatactctcggtgtggctcggtccctggatcacgcccaggtgcctggtccactactcttacaggctttggcattatccttgtactgtcaactacaccctgttcaaagtcaggatgtacgtgggaggggtcgagcacaggctggaggcgcttgcaactggacgcggggcgaacgttgcgatctggacgacagggacaggtccgagctcagcccgctgctgctgtccaccacacagtggcaggttcttccgtgttctttcacgaccttgccagccttgactaccggcctatccacctccaccagaacatcgtggatgtgcaatatttgtacggggtggggtcaagcattgtgtcctgggccatcaagtgggagtacgtcatcctcttgtttctcctgcttgcagacgcgcgcatttttcctgcttgtggatgatgctactcatatcccaggtggaggcagctttggagaacctcgtgctgctcaacgcggcgtctctgaccggggcgcacggtcttgtgtccttcctcgcgtttttctgctttgcatggtatctgaaggtaggtgggtgcccggagcggcctacgccctctacgggatgtggcctctcctcctgcttctgttggcgttgccccaacgggcatacgcactagacacggaagtggccgcgtcgtgtggtggcgttgtattgtcgggttaatggtgctgactctgtcaccgcactacaagcgctatatcagctggtgcttatggtggctccaatatttcctgactagagtggaagcgcaactgcacgtatgggttccccccctcaacgtccgaggaggcgcgacgctgtcatcttgctcatgtgtgttatacacccggccttggtatttgacatcaccaagctgctgctggccgtcttcggacccctttggattcttcaaaccagtctgctcaaagtgccctactcgtgcgcgttcagggccttctccggctctgcgcgctagcgcgcaagatggccggaggccattacgtgcaaatggccatcatcaaggtgggggcgcttactggcacctacatctataaccatcttactcctcttcgggattggcgcacaacagcctacgagatctggccgtggctgtagagccagtcgtcttttcccagatggagactaagctcatcacctggggggcggacaccgccgcctgcggtgacatcatcaacggcttgcccgctctgcccgtaggggccgagagatactgctcggaccggccgacggagcggtctccaaggggtggaggttgctagcgcccatcacggcgtatgcccagcagacaaggggccttttgggatgtataattaccagcctgaccggcgggacaaaaaccaggtggagggtgaggttcagattgtgtctactgctgcccagactttcctggcaacctgcatcaacggggtgtgctggactgtctaccacggggccgggacaaggaccatcgcgtgcccaagggtcccgttatccagatgtataccaatgtagaccaagacctcgtaggctggcccgctccctatggtgctcgctcattgacaccctgcacttgcggctcctcggacctttacctggtcacgaggcacgccgatgtattcccgtacgccggcggggtgatagcaggggcagcctgctttcgcctcgacccatctcttacttgaaaggctcctcggggggcccactactgtgccccgcgggacacgccgtaggcatattcagggcgcggtgtgcacccgtggagtggctaaggcggtggactttatccccgtagagagcctagagacaaccatgaggtccccggtgttcacagacaactcctccccaccagcggtgccccagagcttccaggtggcccacctgcagctcccaccggcagcggtaagagcaccaaggtcccggccgcatacgcggctcagggctacaaggtgctggtgctcaacccctccgttgctgcaacactgggctttggcgcctacatgtccaaggccctgggattgatccgaacatcaggactggggtgaggacaattactactggcagccccatcacgtactccacctacggcaagttcctcgctgacggcgggtgctcagggggtgcttatgacataataatttgtgacgagtgccatccacggatgcaacatccatcttgggcatcggcactgtccttgaccaagcagagacagcgggggcgaggctggttgtgctcgccaccgctacccctccgggctccgtcactgtgccccactctaacacgaggaggttgctctgtccactaccggagagatccccttttacggcaaggctatcccccttgaggcaatcaagggggggagacatctcattttctgccactcaaggaaaaagtgcgacgagctcgccgcaaggctggtcgcttgggcatcaatgctgtggcctactaccgcggccttgacgtgtccgtcatcccgaccagcggcgacgttgtcgtcgtggcaactgatgccctcatgaccggcttttccggcgacttcgactcggtgaagactgcaacacgtgtgtcacccagacagtcgacttcagccttgaccctaccttcaccattgagacaaccacgcttcctcaggacgctgtttcccgcacccaacgtcggggcaggactggcagggggaagccaggcatctaagatttgtggcaccgggagagcgcccctccggcatgttcgactcgtccgtcctctgtgagtgctatgacgcaggctgtgcttggtatgagctcacacccgccgagaccacagttaggttacgagcgtcatgaacaccccggggcttcccgtgtgccaggaccatcttgaattttgggagggcgtcttcacaggtctcacccatatagacgcccacttcttatctcagacaaagcagagtggggaaaactttccttacctggtagcgtacaagccaccgtgtgcgctagagctcaagctccccccccatcgtgggaccagatgtggaagtgcttgatccgcctcaagcccacccttcatgggccaacacctctgctatacagactgggcgctgttcgaatgaaatcaccctgacgcacccgatcaccaagtacatcatgacatgcatgtcggctgacct

SEQ ID NO: 423 - DNA, 4872 bp, Hepatitis C virus; identical to SEQ ID NO: 421

SEQ ID NO: 424 - DNA, 4872 bp, Hepatitis C virus; identical to SEQ ID NO: 421

SEQ ID NO: 425 - DNA, 4872 bp, Hepatitis C virus
tcgcccacaggacgtcaagttcccgggtggcggtcagatcgttggtggagtttacttgttaccgcgcaggggccctagattgggtgtgcgcgcgacgaggaagacttccgagcggtcgcaacctcgagtagacgtcagcctatccccaaggcgcgtcggcccgagggcaggacctgggctcagcccgggtacccttggcccctctatggcaatgagggctgcgggtgggcgggatggctcctgtccccccgtggtctcggcctagctggggccctacagacccccggcgtaggtcgcgcaatttgggtaaggtcatcgataccctcacgtgcggcttcgccgacctcatggggtacattccgctcgtcggcgcgcctcttggaggcgccgccaggccctggcgcatggtgtccgggttctggaggacggcgtgaactatgcaacagggaaccttcctggttgctctttctctatcttccttttggccctgctctcttgcctgactgtacccgcgtcggcctacaagttcgcaactcctcggggctttatcatgtcaccaatgattgccctaactcgagtattgtgtacgagacggccgacgccattctacactctccggggtgtgtcccttgcgtccgcgagggtaacgcctcgaagtgctggtgccggtggcccccacagtggccaccaaggacggcaaactccccacgacgcagcttcgacgtcacatcgatctgcttgtcgggagcgccaccctctgctcggccctctatgtgggggacttgtgcggtctgtcttccttgtcggtcaactgttcactttctcccccagacgccactggacaacgcaagactgcaactgttccatctaccccggccatataacgggccaccgcatggcatgggatatgatgatgaattggtctcctacacagcgctggtaatggctcaactgctcagagtcccgcaagctgtcatggacatgatcgctggagcccactggggagtcctagcgggcatagcgtatttctccatggtggggaactgggcaaaggtcttttggtgctgttgttgtttgccggcgtcgacgcgagcactcgcaccatcggggggtctgctgctgcgaccacgtccggattcgccaagctcttcgctgctggctcccgccagaatgtccagctgatcaacaccaacggaagtggcacatcaatcgcacggccttgaactgtaatgcgagtctcgacactggctgggtagcggggctcttctattaccacaaattcaactcttcgggctgccccgagaggatggccagctgtagacccctgccgatttcgaccagggctggggccctatcagctacgccaacgcaagcggcaccgaccaccccccctactgctggcactaccccccaaagccttgcggtatcgtgccggcacagaacgtatgtggcccagtatattgcttcctcccagccctgtggtggtgggaacgaccgacaagttgggcgtgcccacctacaactggggtagcaatgacacggacgtcttcgtccttaacaacaccaggccaccgttgggcaattggttcggttgacctggatggactcatatggatataccaaagtgtgcggagcgcccccttgtgtcatcggaggggtaggcaataacaccttgcactgccccactgactgtttccgcaagcatccagaagccacatactctcggtgtggctccgtccctggatcacgcccaggtgcctggtccactactcttacaggctttggcattatccttgtactgtcaactacaccctgttcaaagtcaggatgtacgtgggaggggtcgagcacaggctggaggtgcttgcaactggacgcggggcgaacgttgcgatctggacgacagggacaggtccgagctcagcccgctgctgctgtccaccacacagtggcaggttcttccgtgttctttcacgaccttgccagccttgactaccggcctctccacctccaccagaacatcgtggatgtgcaatatttgtacggggtggggtcaagcattgtgtcctgggccatcaagtgggagtacgtcatcctcttgtttctcctgcttgcagacgcgcgcatttgtcctgcttgtggatgatgctactcatatcccaggtggaggcagctttggagaacctcgtgctgctcaacgcggcgtctctgaccggggcgcacggtcttgtgtccttcctcgtgtttttctgctttgcatggtatctgaaggtaggtgggtgcccggagcggcctacgccctctacgggatgtggcctctcctcctgcttctgttggcgttgccccaacgggcatacgcactagacacggaagtggccgcgtcgtgtggtggcgttgtattgtcgggttaatggtgctgactctgtcaccgcactacaagcgctatatcagctggtgcttatggtggctccaatatttcctgactagagtggaagcgcaactgcacgtatgggtcccccccctcaacgtccgaggaggcgcgacgctgtcatcttgctcatgtgtgttatacacccggccttggtatttgacatcaccaagctgctgctggccgtcttcggacccctttggattcttcaaaccagtctgctcaaagtgccctacttgtgcgcgttcagggccttctccggctctgcgcgctagcgcgcaagatggccggaggccattacgtgcaaatggccatcatcaaggtgggggcgcttactggcacctacatctataaccatcttactcctcttcgggattggcgcacaacagcctacgagatctggccgtggctgtagagccagtcgtcttttcccagatggagactaagctcatcacctggggggcggacaccgccgcctgcggtgacatcatcaacggcttgcccgttctgcccgtaggggccgagagatactgctcggaccggccgacggagcggtctccaaggggtggaggttgctagcgcccatcacggcgtatgcccagcagacaaggggccttttgggatgtataattaccagcctgaccggcgggacaaaaaccaggtggagggtgaggttcagattgtgtctactgctgcccagactttcctggcaacctgcatcaacggggtgtgctggactgtctaccacggggccgggacaaggaccatcgcgtccccaagggtcccgttatccagatgtataccaatgtagaccaagacctcgtaggctggcccgctccctatggtgctcgctcattgacaccctgcacttgcggctcctcggacctttacctggtcacgaggcacgccgatgtcttcccgtacgccggcggggtgatagcaggggcagcctgctttcgcctcgacccatctcttacttgaaaggctcctcggggggcccactactgtgccccgcgggacacgccgtaggcatattcagggcgcggtgtgcacccgtggagtggctaaggcggtggactttatccccgtagagagcctagagacaaccatgaggtccccggtgttcacagacaactcctccccaccagcggtgccccagagcttccaggtggcccacctgcacctcccaccggcagcggtaagagcaccaaggtcccggccgcatacgcggctcagggctacaaggtgctggtgctcaacccctccgttgctgcaacactgggctttggcgcctacatgtccaaggcccagggattgatccgaacatcaggactggggtgaggacaattactactggcagccccatcacgtactccacctacggcaagttcctcgctgacggcgggtgctcagggggtgcttatgacataataatttgtgacgagtgccacccacggatgcaacatccatcttgggcatcggcactgtccttgaccaagcagagacagcgggggcgaggctggttgtgctcgccaccgctacccctccgggctccgtcactgtgccccactctaacatgaggaggttgctctgtccactaccggagagatccccttttacggcaaggctatcccccttgaggcaatcaagggggggagacatctcattttctgccactcaaggaaaaagtgcgacgagctcgccgcaaggctggtcgcgtgggcatcaatgctgtggcctactaccgcggccttgacgtgtccgtcatcccgaccagcggcgacgttgtcgtcgtggcaactgatgccctcatgaccggcttttccggcgacttcgactcggtgatgactgcaacacgtgtgtcacccagacagtcgccttcagccttgaccctaccttcaccattgagacaaccacgcttcctcaggacgctgtttcccgcacccaacgtcggggcaggactggcagggggaagccaggcatctatgatttgtggcaccgggagagcgcccctccggcatgttcgactcgtccgtcctctgtgagtgctatgacgcaggctgtgcttggtatgagctcacacccgccgagaccacagttaggttacgagcgtaatgaacaccccggggcttcccgtgtgccaggaccatcttgaattttgggagggcgtcttcacaggtctcacccatatagacgcccacttcttatctcagacaaagcagagtggggaaaactttccttacctggtagcgtacaagccaccgtgtgcgctagagctcaagctccccccccatcgtgggaccagatgtggaagtgcttgatccgcctcaagcccacccttcatgggccaacacctctgctatacagactgggcgctgttcaaatgaaatcaccctgacgcacccgatcaccaagtacatcatgacatgcatgtcggctgacct

SEQ ID NO: 426 - DNA, 4872 bp, Hepatitis C virus; identical to SEQ ID NO: 421

SEQ ID NO: 427 - DNA, 4872 bp, Hepatitis C virus
tcgcccacaggacgtcaagttcccgggtggcggtcagatcgttggtggagtttacttgttaccgcgcaggggccctagattgggtgtgcgcgcgacgaggaagacttccgagcggtcgcaacctcgagtagacgtcagcctatccccaaggcgcgtcggcccgagggcaggacctgggctcagcccgggtacccttggcccctctatggcaatgagggctgcgggtgggcgggatggctcctgtccccccgtggtctcggcctagctggggccctacagacccccggcgtaggtcgcgcaatttgggtaaggtcatcgataccctcacgtgcggcttcgccgacctcatggggtacattccgctcgtcggcgcgcctcttggaggcgccgccaggccctggcgcatggtgtccgggttctggaggacggcgtgaactatgcaacagggaaccttcctggttgctctttctctatcttccttttggccctgctctcttgcctgactgtacccgcgtcggcctacaagttcgcaactcctcggggctttatcatgtcaccaatgattgccctaactcgagtattgtgtacgagacggccgacgccattctacactctccggggtgtgtcccttgcgtccgcgagggtaacgcctcgaagtgctggtgccggtggcccccacagtggccaccaaggacggcaaactccccacgacgcagcttcgacgtcacatcgatctgcttgtcgggagcgccaccctctgctcggccctctatgtgggggacttgtgcggtctgtcttccttgtcggtcaactgttcactttctcccccagacgccactggacaacgcaagactgcaactgttccatctaccccggccatataacgggccaccgcatggcatgggatatgatgatgaattggtctcctacacagcgctggtaatggctcaactgctcagagtcccgcaagctgtcatggacatgatcgctggagcccactggggagtcctagcgggcatagcgtatttctccatggtggggaactgggcaaaggtcttttggtgctgttgttgtttgccggcgtcgacgcgagcactcgcaccatcggggggtctgctgctgcgaccacgtccggattcgccaagctcttcgctgctggctcccgccagaatgtccagctgatcaacaccaacggaagtggcacatcaatcgcacggccttgaactgtaatgcgagtctcgacactggctgggtagcggggctcttctattaccacaaattcaactcttcgggctgccccgagaggatggccagctgtagacccctgccgatttcgaccagggctggggccctatcagctacgccaacgcaagcggcaccgaccaccccccctactgctggcactaccccccaaagccttgcggtatcgtgccggcacagaacgtatgtggcccagtatattgcttcctcccagccctgtggtggtgggaacgaccgacaagttgggcgtgcccacctacaactggggtagcaatgacacggacgtcttcgtccttaacaacaccaggccaccgttgggcaattggttcggttgacctggatggactcatatggatataccaaagtgtgcggagcgcccccttgtgtcatcggaggggtaggcaataacaccttgcactgccccactgactgtttccgcaagcatccagaagccacatactctcggtgtggctccgtccctggatcacgcccaggtgcctggtccactactcttacaggctttggcattatccttgtactgtcaactacaccctgttcaaagtcaggatgtacgtgggaggggtcgagcacaggctggaggtgcttgcaactggacgcggggcgaacgttgcgatctggacgacagggacaggtccgagctcagcccgctgctgctgtccaccacacagtggcaggttcttccgtgttctttcacgaccttgccagccttgactaccggcctctccacctccaccagaacatcgtggatgtgcaatatttgtacggggtggggtcaagcattgtgtcctgggccatcaagtgggagtacgtcatcctcttgtttctcctgcttgcagacgcgcgcatttgtcctgcttgtggatgatgctactcatatcccaggtggaggcagctttggagaacctcgtgctgctcaacgcggcgtctctgaccggggcgcacggtcttgtgtccttcctcgtgtttttctgctttgcatggtatctgaaggtaggtgggtgcccggagcggcctacgccctctacgggatgtggcctctcctcctgcttctgttggcgttgccccaacgggcatacgcactagacacggaagtggccgcgtcgtgtggtggcgttgtattgtcgggttaatggtgctgactctgtcaccgcactacaagcgctatatcagctggtgcttatggtggctccaatatttcctgactagagtggaagcgcaactgcacgtatgggtcccccccctcaacgtccgaggaggcgcgacgctgtcatcttgctcatgtgtgttatacacccggccttggtatttgacatcaccaagctgctgctggccgtcttcggacccctttggattcttcaaaccagtctgctcaaagtgccctacttgtgcgcgttcagggccttctccggctctgcgcgctagcgcgcaagatggccggaggccattacgtgcaaatggccatcatcaaggtgggggcgcttactggcacctacatctataaccatcttactcctcttcgggattggcgcacaacagcctacgagatctggccgtggctgtagagccagtcgtcttttcccagatggagactaagctcatcacctggggggcggacaccgccgcctgcggtgacatcatcaacggcttgcccgttctgcccgtaggggccgagagatactgctcggaccggccgacggagcggtctccaaggggtggaggttgctagcgcccatcacggcgtatgcccagcagacaaggggccttttgggatgtataattaccagcctgaccggcgggacaaaaaccaggtggagggtgaggttcagattgtgtctactgctgcccagactttcctggcaacctgcatcaacggggtgtgctggactgtctaccacggggccgggacaaggaccatcgcgtccccaagggtcccgttatccagatgtataccaatgtagaccaagacctcgtaggctggcccgctccctatggtgctcgctcattgacaccctgcacttgcggctcctcggacctttacctggtcacgaggcacgccgatgtcttcccgtacgccggcggggtgatagcaggggcagcctgctttcgcctcgacccatctcttacttgaaaggctcctcggggggcccactactgtgccccgcgggacacgccgtaggcatattcagggcgcggtgtgcacccgtggagtggctaaggcggtggactttatccccgtagagagcctagagacaaccatgaggtccccggtgttcacagacaactcctccccaccagcggtgccccagagcttccaggtggcccacctgcacctcccaccggcagcggtaagagcaccaaggtcccggccgcatacgcggctcagggctacaaggtgctggtgctcaacccctccgttgctgcaacactgggttttggcgcctacatgtccaaggcccagggattgatccgaacatcaggactggggtgaggacaattactactggcagccccatcacgtactccacctacggcaagttcctcgctgacggcgggtgctcagggggtgcttatgacataataatttgtgacgagtgccacccacggatgcaacatccatcttgggcatcggcactgtccttgaccaagcagagacagcgggggcgaggctggttgtgctcgccaccgctacccctccgggctccgtcactgtgccccactctaacatgaggaggttgctctgtccactaccggagagatccccttttacggcaaggctatcccccttgaggcaatcaagggggggagacatctcattttctgccactcaaggaaaaagtgcgacgagctcgccgcaaggctggtcgcgtgggcatcaatgctgtggcctactaccgcggccttgacgtgtccgtcatcccgaccagcggcgacgttgtcgtcgtggcaactgatgccctcatgaccggcttttccggcgacttcgactcggtgatgactgcaacacgtgtgtcacccagacagtcgacttcagccttgaccctaccttcaccattgagacaaccacgcttcctcaggacgctgtttcccgcacccaacgtcggggcaggactggcagggggaagccaggcatctatgatttgtggcaccgggagagcgcccctccggcatgttcgactcgtccgtcctctgtgagtgctatgacgcaggctgtgcttggtatgagctcacacccgccgagaccacagttaggttacgagcgtaatgaacaccccggggcttcccgtgtgccaggaccatcttgaattttgggagggcgtcttcacaggtctcacccatatagacgcccacttcttatctcagacaaagcagagtggggaaaactttccttacctggtagcgtacaagccaccgtgtgcgctagagctcaagctccccccccatcgtgggaccagatgtggaagtgcttgatccgcctcaagcccacccttcatgggccaacacctctgctatacagactgggcgctgttcaaatgaaatcaccctgacgcacccgatcaccaagtacatcatgacatgcatgtcggctgacct

SEQ ID NO: 428 - DNA, 4872 bp, Hepatitis C virus; identical to SEQ ID NO: 421

SEQ ID NO: 429 - DNA, 4872 bp, Hepatitis C virus; identical to SEQ ID NO: 421

SEQ ID NO: 430 - DNA, 4872 bp, Hepatitis C virus; identical to SEQ ID NO: 421

SEQ ID NO: 431 - DNA, 4872 bp, Hepatitis C virus
tcgcccacaggacgtcaagttcccgggtggcggtcagatcgttggtggagtttacttgttaccgcgcaggggccctagattgggtgtgcgcgcgacgaggaagacttccgagcggtcgcaacctcgagtagacgtcagcctatccccaaggcgcgtcggcccgagggcaggacctgggctcagcccgggtacccttggcccctctatggcaatgagggctgcgggtgggcgggatggctcctgtccccccgtggtctcggcctagctggggccctacagacccccggcgtaggtcgcgcaatttgggtaaggtcatcgataccctcacgtgcggcttcgccgacctcatggggtacattccgctcgtcggcgcgcctcttggaggcgccgccaggccctggcgcatggtgtccgggttctggaggacggcgtgaactatgcaacagggaaccttcctggttgctctttctctatcttccttttggccctgctctcttgcctgactgtacccgcgtcggcctacaagttcgcaactcctcggggctttatcatgtcaccaatgattgccctaactcgagtattgtgtacgagacggccgacgccattctacactctccggggtgtgtcccttgcgtccgcgagggtaacgcctcgaagtgctggtgccggtggcccccacagtggccaccaaggacggcaaactccccacgacgcagcttcgacgtcacatcgatctgcttgtcgggagcgccaccctctgctcggccctctatgtgggggacttgtgcggtctgtcttccttgtcggtcaactgttcactttctcccccagacgccactggacaacgcaagactgcaactgttccatctaccccggccatataacgggccaccgcatggcatgggatatgatgatgaattggtctcctacacagcgctggtaatggctcaactgctcagagtcccgcaagctgtcatggacatgatcgctggagcccactggggagtcctagcgggcatagcgtatttctccatggtggggaactgggcaaaggtcttttggtgctgttgttgtttgccggcgtcgacgcgagcactcgcaccatcggggggtctgctgctgcgaccacgtccggattcgccaagctcttcgctgctggctcccgccagaatgtccagctgatcaacaccaacggaagtggcacatcaatcgcacggccttgaactgtaatgcgagtctcgacactggctgggtagcggggctcttctattaccacaaattcaactcttcgggctgccccgagaggatggccagctgtagacccctgccgatttcgaccagggctggggccctatcagctacgccaacgcaagcggcaccgaccaccccccctactgctggcactaccccccaaagccttgcggtatcgtgccggcacagaacgtatgtggcccagtatattgcttcctcccagccctgtggtggtgggaacgaccgacaagttgggcgtgcccacctacaactggggtagcaatgacacggacgtcttcgtccttaacaacaccaggccaccgttgggcaattggttcggttgacctggatggactcatatggatataccaaagtgtgcggagcgcccccttgtgtcatcggaggggtaggcaataacaccttgcactgccccactgactgtttccgcaagcatccagaagccacatactctcggtgtggctccgtccctggatcacgcccaggtgcctggtccactactcttacaggctttggcattatccttgtactgtcaactacaccctgttcaaagtcaggatgtacgtgggaggggtcgagcacaggctggaggtgcttgcaactggacgcggggcgaacgttgcgatctggacgacagggacaggtccgagctcagcccgctgctgctgtccaccacacagtggcaggttcttccgtgttctttcacgaccttgccagccttgactaccggcctctccacctccaccagaacatcgtggatgtgcaatatttgtacggggtggggtcaagcattgtgtcctgggccatcaagtgggagtacgtcatcctcttgtttctcctgcttgcagacgcgcgcatttgtcctgcttgtggatgatgctactcatatcccaggtggaggcagctttggagaacctcgtgctgctcaacgcggcgtctctgaccggggcgcacggtcttgtgtccttcctcgtgtttttctgctttgcatggtatctgaaggtaggtgggtgcccggagcggcctacgccctctacgggatgtggcctctcctcctgcttctgttggcgttgccccaacgggcatacgcactagacacggaagtggccgcgtcgtgtggtggcgttgtattgtcgggttaatggtgctgactctgtcaccgcactacaagcgctatatcagctggtgcttatggtggctccaatatttcctgactagagtggaagcgcaactgcacgtatgggtcccccccctcaacgtccgaggaggcgcgacgctgtcatcttgctcatgtgtgttatacacccggccttggtatttgacatcaccaagctgctgctggccgtcttcggacccctttggattcttcaaaccagtctgctcaaagtgccctacttgtgcgcgttcagggccttctccggctctgcgcgctagcgcgcaagatggccggaggccattacgtgcaaatggccatcatcaaggtgggggcgcttactggcacctacatctataaccatcttactcctcttcgggattggcgcacaacagcctacgagatctggccgtggctgtagagccagtcgtcttttcccagatggagactaagctcatcacctggggggcggacaccgccgcctgcggtgacatcatcaacggcttgcccgttctgcccgtaggggccgagagatactgctcggaccggccgacggagcggtctccaaggggtggaggttgctagcgcccatcacggcgtatgcccagcagacaaggggccttttgggatgtataattaccagcctgaccggcgggacaaaaaccaggtggagggtgaggttcagattgtgtctactgctgcccagactttcctggcaacctgcatcaacggggtgtgctggactgtctaccacggggccgggacaaggaccatcgcgtccccaagggtcccgttatccagatgtataccaatgtagaccaagacctcgtaggctggcccgctccctatggtgctcgctcattgacaccctgcacttgcggctcctcggacctttacctggtcacgaggcacgccgatgtcttcccgtacgccggcggggtgatagcaggggcagcctgctttcgcctcgacccatctcttacttgaaaggctcctcggggggcccactactgtgccccgcgggacacgccgtaggcatattcagggcgcggtgtgcacccgtggagtggctaaggcggtggactttatccccgtagagagcctagagacaaccatgaggtccccggtgttcacagacaactcctccccaccagcggtgccccagagcttccaggtggcccacctgcacctcccaccggcagcggtaagagcaccaaggtcccggccgcatacgcggctcagggctacaaggtgctggtgctcaacccctccgttgctgcaacactgggctttggcgcctacatgtccaaggcccagggattgatccgaacatcaggactggggtgaggacaattactactggcagccccatcacgtactccacctacggcaagttcctcgctgacggcgggtgctcagggggtgcttatgacataataatttgtgacgagtgccacccacggatgcaacatccatcttgggcatcggcactgtccttgaccaagcagagacagcgggggcgaggctggttgtgctcgccaccgctacccctccgggctccgtcactgtgccccactctaacatgaggaagttgctctgtccactaccggagagatccccttttacggcaaggctatcccccttgaggcaatcaagggggggagacatctcattttctgccactcaaggaaaaagtgcgacgagctcgccgcaaggctggtcgcgtgggcatcaatgctgtggcctactaccgcggccttgacgtgtccgtcatcccgaccagcggcgacgttgtcgtcgtggcaactgatgccctcatgaccggcttttccggcgacttcgactcggtgatgactgcaacacgtgtgtcacccagacagtcgacttcagccttgaccctaccttcaccattgagacaaccacgcttcctcaggacgctgtttcccgcacccaacgtcggggcaggactggcagggggaagccaggcatctatgatttgtggcaccgggagagcgcccctccggcatgttcgactcgtccgtcctctgtgagtgctatgacgcaggctgtgcttggtatgagctcacacccgccgagaccacagttaggttacgagcgtaatgaacaccccggggcttcccgtgtgccaggaccatcttgaattttgggagggcgtcttcacaggtctcacccatatagacgcccacttcttatctcagacaaagcagagtggggaaaactttccttacctggtagcgtacaagccaccgtgtgcgctagagctcaagctccccccccatcgtgggaccagatgtggaagtgcttgatccgcctcaagcccacccttcatgggccaacacctctgctatacagactgggcgctgttcaaatgaaatcaccctgacgcacccgatcaccaagtacatcatgacatgcatgtcggctgacct

SEQ ID NO: 432 - DNA, 4872 bp, Hepatitis C virus
tcgcccacaggacgtcaagttcccgggtggcggtcagatcgttggtggagtttacttgttaccgcgcaggggccctagattgggtgtgcgcgcgacgaggaagacttccgagcggtcgcaacctcgagtagacgtcagcctatccccaaggcgcgtcggcccgagggcaggacctgggctcagcccgggtacccttggcccctctatggcaatgagggctgcgggtgggcgggatggctcctgtccccccgtggtctcggcctagctggggccctacagacccccggcgtaggtcgcgcaatttgggtaaggtcatcgataccctcacgtgcggcttcgccgacctcatggggtacattccgctcgtcggcgcgcctcttggaggcgccgccaggccctggcgcatggtgtccgggttctggaggacggcgtgaactatgcaacagggaaccttcctggttgctctttctctatcttccttttggccctgctctcttgcctgactgtacccgcgtcggcctacaagttcgcaactcctcggggctttatcatgtcaccaatgattgccctaactcgagtattgtgtacgagacggccgacgccattctacactctccggggtgtgtcccttgcgtccgcgagggtaacgcctcgaagtgctggtgccggtggcccccacagtggccaccaaggacggcaaactccccacgacgcagcttcgacgtcacatcgatctgcttgtcgggagcgccaccctctgctcggccctctatgtgggggacttgtgcggtctgtcttccttgtcggtcaactgttcactttctcccccagacgccactggacaacgcaagactgcaactgttccatctaccccggccatataacgggccaccgcatggcatgggatatgatgatgaattggtctcctacacagcgctggtaatggctcaactgctcagagtcccgcaagctgtcatggacatgatcgctggagcccactggggagtcctagcgggcatagcgtatttctccatggtggggaactgggcaaaggtcttttggtgctgttgttgtttgccggcgtcgacgcgagcactcgcaccatcggggggtctgctgctgcgaccacgtccggattcgccaagctcttcgctgctggctcccgccagaatgtccagctgatcaacaccaacggaagtggcacatcaatcgcacggccttgaactgtaatgcgagtctcgacactggctgggtagcggggctcttctattaccacaaattcaactcttcgggctgccccgagaggatggccagctgtagacccctgccgatttcgaccagggctggggccctatcagctacgccaacgcaagcggcaccgaccaccccccctactgctggcactaccccccaaagccttgcggtatcgtgccggcacagaacgtatgtggcccagtatattgcttcctcccagccctgtggtggtgggaacgaccgacaagttgggcgtgcccacctacaactggggtagcaatgacacggacgtcttcgtccttaacaacaccaggccaccgttgggcaattggttcggttgacctggatggactcatatggatataccaaagtgtgcggagcgcccccttgtgtcatcggaggggtaggcaataacaccttgcactgccccactgactgtttccgcaagcatccagaagccacatactctcggtgtggctccgtccctggatcacgcccaggtgcctggtccactactcttacaggctttggcattatccttgtactgtcaactacaccctgttcaaagtcaggatgtacgtgggaggggtcgagcacaggctggaggtgcttgcaactggacgcggggcgaacgttgcgatctggacgacagggacaggtccgagctcagcccgctgctgctgtccaccacacagtggcaggttcttccgtgttctttcacgaccttgccagccttgactaccggcctctccacctccaccagaacatcgtggatgtgcaatatttgtacggggtggggtcaagcattgtgtcctgggccatcaagtgggagtacgtcatcctcttgtttctcctgcttgcagacgcgcgcatttgtcctgcttgtggatgatgctactcatatcccaggtggaggcagctttggagaacctcgtgctgctcaacgcggcgtctctgaccggggcgcacggtcttgtgtccttcctcgtgtttttctgctttgcatggtatctgaaggtaggtgggtgcccggagcggcctacgccctctacgggatgtggcctctcctcctgcttctgttggcgttgccccaacgggcatacgcactagacacggaagtggccgcgtcgtgtggtggcgttgtattgtcgggttaatggtgctgactctgtcaccgcactacaagcgctatatcagctggtgcttatggtggctccaatatttcctgactagagtggaagcgcaactgcacgtatgggtcccccccctcaacgtccgaggaggcgcgacgctgtcatcttgctcatgtgtgttatacacccggccttggtatttgacatcaccaagctgctgctggccgtcttcggacccctttggattcttcaaaccagtctgctcaaagtgccctacttgtgcgcgttcagggccttctccggctctgcgcgctagcgcgcaagatggccggaggccattacgtgcaaatggccatcatcaaggtgggggcgcttactggcacctacatctataaccatcttactcctcttcgggattggcgcacaacagcctacgagatctggccgtggctgtagagccagtcgtcttttcccagatggagactaagctcatcacctggggggcggacaccgccgcctgcggtgacatcatcaacggcttgcccgttctgcccgtaggggccgagagatactgctcggaccggccgacggagcggtctccaaggggtggaggttgctagcgcccatcacggcgtatgcccagcagacaagaggccttttgggatgtataattaccagcctgaccggcgggacaaaaaccaggtggagggtgaggttcagattgtgtctactgctgcccagactttcctggcaacctgcatcaacggggtgtgctggactgtctaccacggggccgggacaaggaccatcgcgtccccaagggtcccgttatccagatgtataccaatgtagaccaagacctcgtaggctggcccgctccctatggtgctcgctcattgacaccctgcacttgcggctcctcggacctttacctggtcacgaggcacgccgatgtcttcccgtacgccggcggggtgatagcaggggcagcctgctttcgcctcgacccatctcttacttgaaaggctcctcggggggcccactactgtgccccgcgggacacgccgtaggcatattcagggcgcggtgtgcacccgtggagtggctaaggcggtggactttatccccgtagagagcctagagacaaccatgaggtccccggtgttcacagacaactcctccccaccagcggtgccccagagcttccaggtggcccacctgcacctcccaccggcagcggtaagagcaccaaggtcccggccgcatacgcggctcagggctacaaggtgctggtgctcaacccctccgttgctgcaacactgggctttggcgcctacatgtccaaggcccagggattgatccgaacatcaggactggggtgaggacaattactactggcagccccatcacgtactccacctacggcaagttcctcgctgacggcgggtgctcagggggtgcttatgacataataatttgtgacgagtgccacccacggatgcaacatccatcttgggcatcggcactgtccttgaccaagcagagacagcgggggcgaggctggttgtgctcgccaccgctacccctccgggctccgtcactgtgccccactctaacatgaggaggttgctctgtccactaccggagagatccccttttacggcaaggctatcccccttgaggcaatcaagggggggagacatctcattttctgccactcaaggaaaaagtgcgacgagctcgccgcaaggctggtcgcgtgggcatcaatgctgtggcctactaccgcggccttgacgtgtccgtcatcccgaccagcggcgacgttgtcgtcgtggcaactgatgccctcatgaccggcttttccggcgacttcgactcggtgatgactgcaacacgtgtgtcacccagacagtcgacttcagccttgaccctaccttcaccattgagacaaccacgcttcctcaggacgctgtttcccgcacccaacgtcggggcaggactggcagggggaagccaggcatctatgatttgtggcaccgggagagcgcccctccggcatgttcgactcgtccgtcctctgtgagtgctatgacgcaggctgtgcttggtatgagctcacacccgccgagaccacagttaggttacgagcgtaatgaacaccccggggcttcccgtgtgccaggaccatcttgaattttgggagggcgtcttcacaggtctcacccatatagacgcccacttcttatctcagacaaagcagagtggggaaaactttccttacctggtagcgtacaagccaccgtgtgcgctagagctcaagctccccccccatcgtgggaccagatgtggaagtgcttgatccgcctcaagcccacccttcatgggccaacacctctgctatacagactgggcgctgttcaaatgaaatcaccctgacgcacccgatcaccaagtacatcatgacatgcatgtcggctgacct

SEQ ID NO: 433 - DNA, 4872 bp, Hepatitis C virus
tcgcccacaggacgtcaagttcccgggtggcggtcagatcgttggtggagtttacttgttaccgcgcaggggccctagattgggtgtgcgcgcgacgaggaagacttccgagcggtcgcaacctcgagtagacgtcagcctatccccaaggcgcgtcggcccgagggcaggacctgggctcagcccgggtacccttggcccctctatggcaatgagggctgcgggtgggcgggatggctcctgtccccccgtggtctcggcctagctggggccctacagacccccggcgtaggtcgcgcaatttgggtaaggtcatcgataccctcacgtgcggcttcgccgacctcatggggtacattccgctcgtcggcgcgcctcttggaggcgccgccaggccctggcgcatggtgtccgggttctggaggacggcgtgaactatgcaacagggaaccttcctggttgctctttctctatcttccttttggccctgctctcttgcctgactgtacccgcgtcggcctacaagttcgcaactcctcggggctttatcatgtcaccaatgattgccctaactcgagtgttgtgtacgagacggccgacgccattctacactctccggggtgtgtcccttgcgtccgcgagggtaacgcctcgaagtgctggtgccggtggcccccacagtggccaccaaggacggcaaactccccacgacgcagcttcgacgtcacatcgatctgcttgtcgggagcgccaccctctgctcggccctctatgtgggggacttgtgcggtctgtcttccttgtcggtcaactgttcactttctcccccagacgccactggacaacgcaagactgcaactgttccatctaccccggccatataacgggccaccgcatggcatgggatatgatgatgaattggtctcctacacagcgctggtaatggctcaactgctcagagtcccgcaagctgtcatggacatgatcgctggagcccactggggagtcctagcgggcatagcgtatttctccatggtggggaactgggcaaaggtcttttggtgctgttgttgtttgccggcgtcgacgcgagcactcgcaccatcggggggtctgctgctgcgaccacgtccggattcgccaagctcttcgctgctggctcccgccagaatgtccagctgatcaacaccaacggaagtggcacatcaatcgcacggccttgaactgtaatgcgagtctcgacactggctgggtagcggggctcttctattaccacaaattcaactcttcgggctgccccgagaggatggccagctgtagacccctgccgatttcgaccagggctggggccctatcagctacgccaacgcaagcggcaccgaccaccccccctactgctggcactaccccccaaagccttgcggtatcgtgccggcacagaacgtatgtggcccagtatattgcttcctcccagccctgtggtggtgggaacgaccgacaagttgggcgtgcccacctacaactggggtagcaatgacacggacgtcttcgtccttaacaacaccaggccaccgttgggcaattggttcggttgacctggatggactcatatggatataccaaagtgtgcggagcgcccccttgtgtcatcggaggggtaggcaataacaccttgcactgccccactgactgtttccgcaagcatccagaagccacatactctcggtgtggctccgtccctggatcacgcccaggtgcctggtccactactcttacaggctttggcattatccttgtactgtcaactacaccctgttcaaagtcaggatgtacgtgggaggggtcgagcacaggctggaggtgcttgcaactggacgcggggcgaacgttgcgatctggacgacagggacaggtccgagctcagcccgctgctgctgtccaccacacagtggcaggttcttccgtgttctttcacgaccttgccagccttgactaccggcctctccacctccaccagaacatcgtggatgtgcaatatttgtacggggtggggtcaagcattgtgtcctgggccatcaagtgggagtacgtcatcctcttgtttctcctgcttgcagacgcgcgcatttgtcctgcttgtggatgatgctactcatatcccaggtggaggcagctttggagaacctcgtgctgctcaacgcggcgtctctgaccggggcgcacggtcttgtgtccttcctcgtgtttttctgctttgcatggtatctgaaggtaggtgggtgcccggagcggcctacgccctctacgggatgtggcctctcctcctgcttctgttggcgttgccccaacgggcatacgcactagacacggaagtggccgcgtcgtgtggtggcgttgtattgtcgggttaatggtgctgactctgtcaccgcactacaagcgctatatcagctggtgcttatggtggctccaatatttcctgactagagtggaagcgcaactgcacgtatgggtcccccccctcaacgtccgaggaggcgcgacgctgtcatcttgctcatgtgtgttatacacccggccttggtatttgacatcaccaagctgctgctggccgtcttcggacccctttggattcttcaaaccagtctgctcaaagtgccctacttgtgcgcgttcagggccttctccggctctgcgcgctagcgcgcaagatggccggaggccattacgtgcaaatggccatcatcaaggtgggggcgcttactggcacctacatctataaccatcttactcctcttcgggattggcgcacaacagcctacgagatctggccgtggctgtagagccagtcgtcttttcccagatggagactaagctcatcacctggggggcggacaccgccgcctgcggtgacatcatcaacggcttgcccgttctgcccgtaggggccgagagatactgctcggaccggccgacggagcggtctccaaggggtggaggttgctagcgcccatcacggcgtatgcccagcagacaaggggccttttgggatgtataattaccagcctgaccggcgggacaaaaaccaggtggagggtgaggttcagattgtgtctactgctgcccagactttcctggcaacctgcatcaacggggtgtgctggactgtctaccacggggccgggacaaggaccatcgcgtccccaagggtcccgttatccagatgtataccaatgtagaccaagacctcgtaggctggcccgctccctatggtgctcgctcattgacaccctgcacttgcggctcctcggacctttacctggtcacgaggcacgccgatgtcttcccgtacgccggcggggtgatagcaggggcagcctgctttcgcctcgacccatctcttacttgaaaggctcctcggggggcccactactgtgccccgcgggacacgccgtaggcatattcagggcgcggtgtgcacccgtggagtggctaaggcggtggactttatccccgtagagagcctagagacaaccatgaggtccccggtgttcacagacaactcctccccaccagcggtgccccagagcttccaggtggcccacctgcacctcccaccggcagcggtaagagcaccaaggtcccggccgcatacgcggctcagggctacaaggtgctggtgctcaacccctccgttgctgcaacactgggctttggcgcctacatgtccaaggcccagggattgatccgaacatcaggactggggtgaggacaattactactggcagccccatcacgtactccacctacggcaagttcctcgctgacggcgggtgctcagggggtgcttatgacataataatttgtgacgagtgccacccacggatgcaacatccatcttgggcatcggcactgtccttgaccaagcagagacagcgggggcgaggctggttgtgctcgccaccgctacccctccgggctccgtcactgtgccccactctaacatgaggaggttgctctgtccactaccggagagatccccttttacggcaaggctatcccccttgaggcaatcaagggggggagacatctcattttctgccactcaaggaaaaagtgcgacgagctcgccgcaaggctggtcgcgtgggcatcaatgctgtggcctactaccgcggccttgacgtgtccgtcatcccgaccagcggcgacgttgtcgtcgtggcaactgatgccctcatgaccggcttttccggcgacttcgactcggtgatgactgcaacacgtgtgtcacccagacagtcgacttcagccttgaccctaccttcaccattgagacaaccacgcttcctcaggacgctgtttcccgcacccaacgtcggggcaggactggcagggggaagccaggcatctatgatttgtggcaccgggagagcgcccctccggcatgttcgactcgtccgtcctctgtgagtgctatgacgcaggctgtgcttggtatgagctcacacccgccgagaccacagttaggttacgagcgtaatgaacaccccggggcttcccgtgtgccaggaccatcttgaattttgggagggcgtcttcacaggtctcacccatatagacgcccacttcttatctcagacaaagcagagtggggaaaactttccttacctggtagcgtacaagccaccgtgtgcgctagagctcaagctccccccccatcgtgggaccagatgtggaagtgcttgatccgcctcaagcccacccttcatgggccaacacctctgctatacagactgggcgctgttcaaatgaaatcaccctgacgcacccgatcaccaagtacatcatgacatgcatgtcggctgacct

SEQ ID NO: 434 - DNA, 4872 bp, Hepatitis C virus
tcgcccacaggacgtcaagttcccgggtggcggtcagatcgttggtggagtttacttgttaccgcgcaggggccctagattgggtgtgcgcgcgacgaggaagacttccgagcggtcgcaacctcgagtagacgtcagcctatccccaaggcgcgtcggcccgagggcaggacctgggctcagcccgggtacccttggcccctctatggcaatgagggctgcgggtgggcgggatggctcctgtccccccgtggtctcggcctagctggggccctacagacccccggcgtaggtcgcgcaatttgggtaaggtcatcgataccctcacgtgcggcttcgccgacctcatggggtacattccgctcgtcggcgcgcctcttggaggcgccgccaggccctggcgcatggtgtccgggttctggaggacggcgtgaactatgcaacagggaaccttcctggttgctctttctctatcttccttttggccctgctctcttgcctgactgtgcccgcgtcggcctacaagttcgcaactcctcggggctttatcatgtcaccaatgattgccctaactcgagtattgtgtacgagacggccgacgccattctacactctccggggtgtgtcccttgcgtccgcgagggtaacgcctcgaagtgctggtgccggtggcccccacagtggccaccaaggacggcaaactccccacgacgcagcttcgacgtcacatcgatctgcttgtcgggagcgccaccctctgctcggccctctatgtgggggacttgtgcggtctgtcttccttgtcggtcaactgttcactttctcccccagacgccactggacaacgcaagactgcaactgttccatctaccccggccatataacgggccaccgcatggcatgggatatgatgatgaattggtctcctacacagcgctggtaatggctcaactgctcagagtcccgcaagctgtcatggacatgatcgctggagcccactggggagtcctagcgggcatagcgtatttctccatggtggggaactgggcaaaggtcttttggtgctgttgttgtttgccggcgtcgacgcgagcactcgcaccatcggggggtctgctgctgcgaccacgtccggattcgccaagctcttcgctgctggctcccgccagaatgtccagctgatcaacaccaacggaagtggcacatcaatcgcacggccttgaactgtaatgcgagtctcgacactggctgggtagcggggctcttctattaccacaaattcaactcttcgggctgccccgagaggatggccagctgtagacccctgccgatttcgaccagggctggggccctatcagctacgccaacgcaagcggcaccgaccaccccccctactgctggcactaccccccaaagccttgcggtatcgtgccggcacagaacgtatgtggcccagtatattgcttcctcccagccctgtggtggtgggaacgaccgacaagttgggcgtgcccacctacaactggggtagcaatgacacggacgtcttcgtccttaacaacaccaggccaccgttgggcaattggttcggttgacctggatggactcatatggatataccaaagtgtgcggagcgcccccttgtgtcatcggaggggtaggcaataacaccttgcactgccccactgactgtttccgcaagcatccagaagccacatactctcggtgtggctccgtccctggatcacgcccaggtgcctggtccactactcttacaggctttggcattatccttgtactgtcaactacaccctgttcaaagtcaggatgtacgtgggaggggtcgagcacaggctggaggtgcttgcaactggacgcggggcgaacgttgcgatctggacgacagggacaggtccgagctcagcccgctgctgctgtccaccacacagtggcaggttcttccgtgttctttcacgaccttgccagccttgactaccggcctctccacctccaccagaacatcgtggatgtgcaatatttgtacggggtggggtcaagcattgtgtcctgggccatcaagtgggagtacgtcatcctcttgtttctcctgcttgcagacgcgcgcatttgtcctgcttgtggatgatgctactcatatcccaggtggaggcagctttggagaacctcgtgctgctcaacgcggcgtctctgaccggggcgcacggtcttgtgtccttcctcgtgtttttctgctttgcatggtatctgaaggtaggtgggtgcccggagcggcctacgccctctacgggatgtggcctctcctcctgcttctgttggcgttgccccaacgggcatacgcactagacacggaagtggccgcgtcgtgtggtggcgttgtattgtcgggttaatggtgctgactctgtcaccgcactacaagcgctatatcagctggtgcttatggtggctccaatatttcctgactagagtggaagcgcaactgcacgtatgggtcccccccctcaacgtccgaggaggcgcgacgctgtcatcttgctcatgtgtgttatacacccggccttggtatttgacatcaccaagctgctgctggccgtcttcggacccctttggattcttcaaaccagtctgctcaaagtgccctacttgtgcgcgttcagggccttctccggctctgcgcgctagcgcgcaagatggccggaggccattacgtgcaaatggccatcatcaaggtgggggcgcttactggcacctacatctataaccatcttactcctcttcgggattggcgcacaacagcctacgagatctggccgtggctgtagagccagtcgtcttttcccagatggagactaagctcatcacctggggggcggacaccgccgcctgcggtgacatcatcaacggcttgcccgttctgcccgtaggggccgagagatactgctcggaccggccgacggagcggtctccaaggggtggaggttgctagcgcccatcacggcgtatgcccagcagacaaggggccttttgggatgtataattaccagcctgaccggcgggacaaaaaccaggtggagggtgaggttcagattgtgtctactgctgcccagactttcctggcaacctgcatcaacggggtgtgctggactgtctaccacggggccgggacaaggaccattgcgtccccaagggtcccgttatccagatgtataccaatgtagaccaagacctcgtaggctggcccgctccctatggtgctcgctcattgacaccctgcacttgcggctcctcggacctttacctggtcacgaggcacgccgatgtcttcccgtacgccggcggggtgatagcaggggcagcctgctttcgcctcgacccatctcttacttgaaaggctcctcggggggcccactactgtgccccgcgggacacgccgtaggcatattcagggcgcggtgtgcacccgtggagtggctaaggcggtggactttatccccgtagagagcctagagacaaccatgaggtccccggtgttcacagacaactcctccccaccagcggtgccccagagcttccaggtggcccacctgcacctcccaccggcagcggtaagagcaccaaggtcccggccgcatacgcggctcagggctacaaggtgctggtgctcaacccctccgttgctgcaacactgggctttggcgcctacatgtccaaggcccagggattgatccgaacatcaggactggggtgaggacaattactactggcagccccatcacgtactccacctacggcaagttcctcgctgacggcgggtgctcagggggtgcttatgacataataatttgtgacgagtgccacccacggatgcaacatccatcttgggcatcggcactgtccttgaccaagcagagacagcgggggcgaggctggttgtgctcgccaccgctacccctccgggctccgtcactgtgccccactctaacatgaggaggttgctctgtccactaccggagagatccccttttacggcaaggctatcccccttgaggcaatcaagggggggagacatctcattttctgccactcaaggaaaaagtgcgacgagctcgccgcaaggctggtcgcgtgggcatcaatgctgtggcctactaccgcggccttgacgtgtccgtcatcccgaccagcggcgacgttgtcgtcgtggcaactgatgccctcatgaccggcttttccggcgacttcgactcggtgatgactgcaacacgtgtgtcacccagacagtcgacttcagccttgaccctaccttcaccattgagacaaccacgcttcctcaggacgctgtttcccgcacccaacgtcggggcaggactggcagggggaagccaggcatctatgatttgtagcaccgggagagcgcccctccggcatgttcgactcgtccgtcctctgtgagtgctatgacgcaggctgtgcttggtatgagctcacacccgccgagaccacagttaggttacgagcgtaatgaacaccccggggcttcccgtgtgccaggaccatcttgaattttgggagggcgtcttcacaggtctcacccatatagacgcccacttcttatctcagacaaagcagagtggggaaaactttccttacctggtagcgtacaagccaccgtgtgcgctagagctcaagctccccccccatcgtgggaccagatgtggaagtgcttgatccgcctcaagcccacccttcatgggccaacacctctgctatacagactgggcgctgttcaaatgaaatcaccctgacgcacccgatcaccaagtacatcatgacatgcatgtcggctgacct

SEQ ID NO: 435 - DNA, 4872 bp, Hepatitis C virus
tcgcccacaggacgtcaagttcccgggtggcggtcagatcgttggtggagtttacttgttaccgcgcaggggccctagattgggtgtgcgcgcgacgaggaagacttccgagcggtcgcaacctcgagtagacgtcagcctatccccaaggcgcgtcggcccgagggcaggacctgggctcagcccgggtacccttggcccctctatggcaatgagggctgcgggtgggcgggatggctcctgtccccccgtggtctcggcctagctggggccctacagacccccggcgtaggtcgcgcaatttgggtaaggtcatcgataccctcacgtgcggcttcgccgacctcatggggtacattccgctcgtcggcgcgcctcttggaggcgccgccaggccctggcgcatggtgtccgggttctggaggacggcgtgaactatgcaacagggaaccttcctggttgctctttctctatcttccttttggccctgctctcttgcctgactgtacccgcgtcggcctacaagttcgcaactcctcggggctttatcatgtcaccaatgattgccctaactcgagtattgtgtacgagacggccgacgccattctacactctccggggtgtgtcccttgcgtccgcgagggtaacgcctcgaagtgctggtgccggtggcccccacagtggccaccaaggacggcaaactccccacgacgcagcttcgacgtcacatcgatctgcttgtcgggagcgccaccctctgctcggccctctatgtgggggacttgtgcggtctgtcttccttgtcggtcaactgttcactttctcccccagacgccactggacaacgcaagactgcaactgttccatctaccccggccatataacgggccaccgcatggcatgggatatgatgatgaattggtctcctacacagcgctggtaatggctcaactgctcagagtcccgcaagctgtcatggacatgatcgctggagcccactggggagtcctagcgggcatagcgtatttctccatggtggggaactgggcaaaggtcttttggtgctgttgttgtttgccggcgtcgacgcgagcactcgcaccatcggggggtctgctgctgcgaccacgtccggattcgccaagctcttcgctgctggctcccgccagaatgtccagctgatcaacaccaacggaagtggcacatcaatcgcacggccttgaactgtaatgcgagtctcgacactggctgggtagcggggctcttctattaccacaaattcaactcttcgggctgccccgagaggatggccagctgtagacccctgccgatttcgaccagggctggggccctatcagctacgccaacgcaagcggcaccgaccaccccccctactgctggcactaccccccaaagccttgcggtatcgtgccggcacagaacgtatgtggcccagtatattgcttcctcccagccctgtggtggtgggaacgaccgacaagttgggcgtgcccacctacaactggggtagcaatgacacggacgtcttcgtccttaacaacaccaggccaccgttgggcaattggttcggttgacctggatggactcatatggatataccaaagtgtgcggagcgcccccttgtgtcatcggaggggtaggcaataacaccttgcactgccccactgactgtttccgcaagcatccagaagccacatactctcggtgtggctccgtccctggatcacgcccaggtgcctggtccactactcttacaggctttggcattatccttgtactgtcaactacaccctgttcaaagtcaggatgtacgtgggaggggtcgagcacaggctggaggtgcttgcaactggacgcggggcgaacgttgcgatctggacgacagggacaggtccgagctcagcccgctgctgctgtccaccacacagtggcaggttcttccgtgttctttcacgaccttgccagccttgactaccggcctctccacctccaccagaacatcgtggatgtgcaatatttgtacggggtggggtcaagcattgtgtcctgggccatcaagtgggagtacgtcatccttttgtttctcctgcttgcagacgcgcgcatttgtcctgcttgtggatgatgctactcatatcccaggtggaggcagctttggagaacctcgtgctgctcaacgcggcgtctctgaccggggcgcacggtcttgtgtccttcctcgtgtttttctgctttgcatggtatctgaaggtaggtgggtgcccggagcggcctacgccctctacgggatgtggcctctcctcctgcttctgttggcgttgccccaacgggcatacgcactagacacggaagtggccgcgtcgtgtggtggcgttgtattgtcgggttaatggtgctgactctgtcaccgcactacaagcgctatatcagctggtgcttatggtggctccaatatttcctgactagagtggaagcgcaactgcacgtatgggtcccccccctcaacgtccgaggaggcgcgacgctgtcatcttgctcatgtgtgttatacacccggccttggtatttgacatcaccaagctgctgctggccgtcttcggacccctttggattcttcaaaccagtctgctcaaagtgccctacttgtgcgcgttcagggccttctccggctctgcgcgctagcgcgcaagatggccggaggccattacgtgcaaatggccatcatcaaggtaggggcgcttactggcacctacatctataaccatcttactcctcttcgggattggcgcacaacagcctacgagatctggccgtggctgtagagccagtcgtcttttcccagatggagactaagctcatcacctggggggcggacaccgccgcctgcggtgacatcatcaacggcttgcccgttctgcccgtaggggccgagagatactgctcggaccggccgacggagcggtctccaaggggtggaggttgctagcgcccatcacggcgtatgcccagcagacaaggggccttttgggatgtataattaccagcctgaccggcgggacaaaaaccaggtggagggtgaggttcagattgtgtctactgctgcccagactttcctggcaacctgcatcaacggggtgtgctggactgtctaccacggggccgggacaaggaccatcgcgtccccaagggtcccgttatccagatgtataccaatgtagaccaagacctcgtaggctggcccgctccctatggtgctcgctcattgacaccctgcacttgcggctcctcggacctttacctggtcacgaggcacgccgatgtcttcccgtacgccggcggggtgatagcaggggcagcctgctttcgcctcgacccatctcttacttgaaaggctcctcggggggcccactactgtgccccgcgggacacgccgtaggcatattcagggcgcggtgtgcacccgtggagtggctaaggcggtggactttatccccgtagagagcctagagacaaccatgaggtccccggtgttcacagacaactcctccccaccagcggtgccccagagcttccaggtggcccacctgcacctcccaccggcagcggtaagagcaccaaggtcccggccgcatacgcggctcagggctacaaggtgctggtgctcaacccctccgttgctgcaacactgggctttggcgcctacatgtccaaggcccagggattgatccgaacatcaggactggggtgaggacaattactactggcagccccatcacgtactccacctacggcaagttcctcgctgacggcgggtgctcagggggtgcttatgacataataatttgtgacgagtgccacccacggatgcaacatccatcttgggcattggcactgtccttgaccaagcagagacagcgggggcgaggctggttgtgctcgccaccgctacccctccgggctccgtcactgtgccccactctaacatgaggaggttgctctgtccactaccggagagatccccttttacggcaaggctatcccccttgaggcaatcaagggggggagacatctcattttctgccactcaaggaaaaagtgcgacgagctcgccgcaaggctggtcgcgtgggcatcaatgctgtggcctactaccgcggccttgacgtgtccgtcatcccgaccagcggcgacgttgtcgtcgtggcaactgatgccctcatgaccggcttttccggcgacttcgactcggtgatgactgcaacacgtgtgtcacccagacagtcgacttcagccttgaccctaccttcaccattgagacaaccacgcttcctcaggacgctgtttcccgcacccaacgtcggggcaggactggcagggggaagccaggcatctatgatttgtggcaccgggagagcgcccctccggcatgttcgactcgtccgtcctctgtgagtgctatgacgcaggctgtgcttggtatgagctcacacccgccgagaccacagttaggttacgagcgtaatgaacaccccggggcttcccgtgtgccaggaccatcttgaattttgggagggcgtcttcacaggtctcacccatatagacgcccacttcttatctcagacaaagcagagtggggaaaactttccttacctggtagcgtacaagccaccgtgtgcgctagagctcaagctccccccccatcgtgggaccagatgtggaagtgcttgatccgcctcaagcccacccttcatgggccaacacctctgctatacagactgggcgctgttcaaatgaaatcaccctgacgcacccgatcaccaagtacatcatgacatgcatgtcggctgacct

SEQ ID NO: 436 - DNA, 4872 bp, Hepatitis C virus; identical to SEQ ID NO: 421

SEQ ID NO: 437 - DNA, 4872 bp, Hepatitis C virus; identical to SEQ ID NO: 421

SEQ ID NO: 438 - DNA, 4872 bp, Hepatitis C virus
tcgcccacaggacgtcaagttcccgggtggcggtcagatcgttggtggagtttacttgttaccgcgcaggggccctagattgggtgtgcgcgcgacgaggaagacttccgagcggtcgcaacctcgagtagacgtcagcctatccccaaggcgcgtcggcccgagggcaggacctgggctcagcccgggtacccttggcccctctatggcaatgagggctgcgggtgggcgggatggctcctgtccccccgtggtctcggcctagctggggccctacagacccccggcgtaggtcgcgcaatttgggtaaggtcatcgataccctcacgtgcggcttcgccgacctcatggggtacattccgctcgtcggcgcgcctcttggaggcgccgccaggccctggcgcatggtgtccgggttctggaggacggcgtgaactatgcaacagggaaccttcctggttgctctttctctatcttccttttggccctgctctcttgcctgactgtacccgcgtcggcctacaagttcgcaactcctcggggctttatcatgtcaccaatgattgccctaactcgagtattgtgtacgagacggccgacgccattctacactctccggggtgtgtcccttgcgtccgcgagggtaacgcctcgaagtgctggtgccggtggcccccacagtggccaccaaggacggcaaactccccacgacgcagcttcgacgtcacatcgatctgcttgtcgggagcgccaccctctgctcggccctctatgtgggggacttgtgcggtctgtcttccttgtcggtcaactgttcactttctcccccagacgccactggacaacgcaagactgcaactgttccatctaccccggccatataacgggccaccgcatggcatgggatatgatgatgaattggtctcctacacagcgctggtaatggctcaactgctcagagtcccgcaagctgtcatggacatgatcgctggagcccactggggagtcctagcgggcatagcgtatttctccatggtggggaactgggcaaaggtcttttggtgctgttgttgtttgccggcgtcgacgcgagcactcgcaccatcggggggtctgctgctgcgaccacgtccggattcgccaagctcttcgctgctggctcccgccagaatgtccagctgatcaacaccaacggaagtggcacatcaatcgcacggccttgaactgtaatgcgagtctcgacactggctgggtagcggggctcttctattaccacaaattcaactcttcgggctgccccgagaggatggccagctgtagacccctgccgatttcgaccagggctggggccctatcagctacgccaacgcaagcggcaccgaccaccccccctactgctggcactaccccccaaagccttgcggtatcgtgccggcacagaacgtatgtggcccagtatattgcttcctcccagccctgtggtggtgggaacgaccgacaagttgggcgtgcccacctacaactggggtagcaatgacacggacgtcttcgtccttaacaacaccaggccaccgttgggcaattggttcggttgacctggatggactcatatggatataccaaagtgtgcggagcgcccccttgtgtcatcggaggggtaggcaataacaccttgcactgccccactgactgtttccgcaagcatccagaagccacatactctcggtgtggctccgtccctggatcacgcccaggtgcctggtccactactcttacaggctttggcattatccttgtactgtcaactacaccctgttcaaagtcaggatgtacgtgggaggggtcgagcacaggctggaggtgcttgcaactggacgcggggcgaacgttgcgatctggacgacagggacaggtccgagctcagcccgctgctgctgtccaccacacagtggcaggttcttccgtgttctttcacgaccttgccagccttgactaccggcctctccacctccaccagaacatcgtggatgtgcaatatttgtacggggtggggtcaagcattgtgtcctgggccatcaagtgggagtacgtcatcctcttgtttctcctgcttgcagacgcgcgcatttgtcctgcttgtggatgatgctactcatatcccaggtggaggcagctttggagaacctcgtgctgctcaacgcggcgtctctgaccggggcgcacggtcttgtgtccttcctcgtgtttttctgctttgcatggtatctgaaggtaggtgggtgcccggagcggcctacgccctctacgggatgtggcctctcctcctgcttctgttggcgttgccccaacgggcatacgcactagacacggaagtggccgcgtcgtgtggtggcgttgtattgtcgggttaatggtgctgactctgtcaccgcactacaagcgctatatcagctggtgcttatggtggctccaatatttcctgactagagtggaagcgcaactgcacgtatgggtcccccccctcaacgtccgaggaggcgcgacgctgtcatcttgctcatgtgtgttatacacccggccttggtatttgacatcaccaagctgctgctggccgtcttcggacccctttggattcttcaaaccagtctgctcaaagtgccctacttgtgcgcgttcagggccttctccggctctgcgcgctagcgcgcaagatggccggaggccattacgtgcaaatggccatcatcaaggtgggggcgcttactggcacctacatctataaccatcttactcctcttcgggattggcgcacaacatcctacgagatctggccgtggctgtagagccagtcgtcttttcccagatggagactaagctcatcacctggggggcggacaccgccgcctgcggtgacatcatcaacggcttgcccgttctgcccgtaggggccgagagatactgctcggaccggccgacggagcggtctccaaggggtggaggttgctagcgcccatcacggcgtatgcccagcagacaaggggccttttgggatgtataattaccagcctgaccggcgggacaaaaaccaggtggagggtgaggttcagattgtgtctactgctgcccagactttcctggcaacctgcatcaacggggtgtgctggactgtctaccacggggccgggacaaggaccatcgcgtccccaagggtcccgttatccagatgtataccaatgtagaccaagacctcgtaggctggcccgctccctatggtgctcgctcattgacaccctgcacttgcggctcctcggacctttacctggtcacgaggcacgccgatgtcttcccgtacgccggcggggtgatagcaggggcagcctgctttcgcctcgacccatctcttacttgaaaggctcctcggggggcccactactgtgccccgcgggacacgccgtaggcatattcagggcgcggtgtgcacccgtggagtggctaaggcggtggactttatccccgtagagagcctagagacaaccatgaggtccccggtgttcacagacaactcctccccaccagcggtgccccagagcttccaggtggcccacctgcacctcccaccggcagcggtaagagcaccaaggtcccggccgcatacgcggctcagggctacaaggtgctggtgctcaacccctccgttgctgcaacactgggctttggcgcctacatgtccaaggcccagggattgatccgaacatcaggactggggtgaggacaattactactggcagccccatcacgtactccacctacggcaagttcctcgctgacggcgggtgctcagggggtgcttatgacataataatttgtgacgagtgccacccacggatgcaacatccatcttgggcatcggcactgtccttgaccaagcagagacagcgggggcgaggctggttgtgctcgccaccgctacccctccgggctccgtcactgtgccccactctaacatgaggaggttgctctgtccactaccggagagatccccttttacggcaaggctatcccccttgaggcaatcaagggggggagacatctcattttctgccactcaaggaaaaagtgcgacgagctcgccgcaaggctggtcgcgtgggcatcaatgctgtggcctactaccgcggccttgacgtgtccgtcatcccgaccagcggcgacgttgtcgtcgtggcaactgatgccctcatgaccggcttttccggcgacttcgactcggtgatgactgcaacacgtgtgtcacccagacagtcgacttcagccttgaccctaccttcaccattgagacaaccacgcttcctcaggacgctgtttcccgcacccaacgtcggggcaggactggcagggggaagccaggcatctatgatttgtggcaccgggagagcgcccctccggcatgttcgactcgtccgtcctctgtgagtgctatgacgcaggctgtgcttggtatgagctcacacccgccgagaccacagttaggttacgagcgtaatgaacaccccggggcttcccgtgtgccaggaccatcttgaattttgggagggcgtcttcacaggtctcacccatatagacgcccacttcttatctcagacaaagcagagtggggaaaactttccttacctggtagcgtacaagccaccgtgtgcgctagagctcaagctccccccccatcgtgggaccagatgtggaagtgcttgatccgcctcaagcccacccttcatgggccaacacctctgctatacagactgggcgctgttcaaatgaaatcaccctgacgcacccgatcaccaagtacatcatgacatgcatgtcggctgacct

SEQ ID NO: 439 - DNA, 4872 bp, Hepatitis C virus
tcgcccacaggacgtcaagttcccgggtggcggtcagatcgttggtggagtttacttgttaccgcgcaggggccctagattgggtgtgcgcgcgacgaggaagacttccgagcggtcgcaacctcgagtagacgtcagcctatccccaaggcgcgtcggcccgagggcaggacctgggctcagcccgggtacccttggcccctctatggcaatgagggctgcgggtgggcgggatggctcctgtccccccgtggtctcggcctagctggggccctacagacccccggcgtaggtcgcgcaatttgggtaaggtcatcgataccctcacgtgcggcttcgccgacctcatggggtacattccgctcgtcggcgcgcctcttggaggcgccgccaggccctggcgcatggtgtccgggttctggaggacggcgtgaactatgcaacagggaaccttcctggttgctctttctctatcttccttttggccctgctctcttgcctgactgtacccgcgtcggcctacaagttcgcaactcctcggggctttatcatgtcaccaatgattgccctaactcgagtattgtgtacgagacggccgacgccattctacactctccggggtgtgtcccttgcgtccgcgagggtaacgcctcgaagtgctggtgccggtggcccccacagtggccaccaaggacggcaaactccccacgacgcagcttcgacgtcacatcgatctgcttgtcgggagcgccaccctctgctcggccctctatgtgggggacttgtgcggtctgtcttccttgtcggtcaactgttcactttctcccccagacgccactggacaacgcaagactgcaactgttccatctaccccggccatataacgggccaccgcatggcatgggatatgatgatgaattggtctcctacacagcgctggtaatggctcaactgctcagagtcccgcaagctgtcatggacatgatcgctggagcccactggggagtcctagcgggcatagcgtatttctccatggtggggaactgggcaaaggtcttttggtgctgttgttgtttgccggcgtcgacgcgagcactcgcaccatcggggggtctgctgctgcgaccacgtccggattcgccaagctcttcgctgctggctcccgccagaatgtccagctgatcaacaccaacggaagtggcacatcaatcgcacggccttgaactgtaatgcgagtctcgacactggctgggtagcggggctcttctattaccacaaattcaactcttcgggctgccccgagaggatggccagctgtagacccctgccgatttcgaccagggctggggccctatcagctacgccaacgcaagcggcaccgaccaccccccctactgctggcactaccccccaaagccttgcggtatcgtgccggcacagaacgtatgtggcccagtatattgcttcctcccagccctgtggtggtgggaacgaccgacaagttgggcgtgcccacctacaactggggtagcaatgacacggacgtcttcgtccttaacaacaccaggccaccgttgggcaattggttcggttgacctggatggactcatatggatataccaaagtgtgcggagcgcccccttgtgtcatcggaggggtaggcaataacaccttgcactgccccactgactgtttccgcaagcatccagaagccacatactctcggtgtggctccgtccctggatcacgcccaggtgcctggtccactactcttacaggctttggcattatccttgtactgtcaactacaccctgttcaaagtcaggatgtacgtgggaggggtcgagcacaggctggaggtgcttgcaactggacgcggggcgaacgttgcgatctggacgacagggacaggtccgagctcagcccgctgctgctgtccaccacacagtggcaggttcttccgtgttctttcacgaccttgccagccttgactaccggcctctccacctccaccagaacatcgtggatgtgcaatatttgtacggggtggggtcaagcattgtgtcctgggccatcaagtgggagtacgtcatcctcttgtttctcctgcttgcagacgcgcgcatttgtcctgcttgtggatgatgctactcatatcccaggtggaggcagctttggagaacctcgtgctgctcaacgcggcgtctctgaccggggcgcacggtcttgtgtccttcctcgtgtttttctgctttgcatggtatctgaaggtaggtgggtgcccggagcggcctacgccctctacgggatgtggcctctcctcctgcttctgttggcgttgccccaacgggcatacgcactagacacggaagtggccgcgtcgtgtggtggcgttgtattgtcgggttaatggtgctgactctgtcaccgcactacaagcgctatatcagctggtgcttatggtggctccaatatttcctgactagagtggaagcgcaactgcacgtatgggtcccccccttcaacgtccgaggaggcgcgacgctgtcatcttgctcatgtgtgttatacacccggccttggtatttgacatcaccaagctgctgctggccgtcttcggacccctttggattcttcaaaccagtctgctcaaagtgccctacttgtgcgcgttcagggccttctccggctctgcgcgctagcgcgcaagatggccggaggccattacgtgcaaatggccatcatcaaggtgggggcgcttactggcacctacatctataaccatcttactcctcttcgggattggcgcacaacagcctacgagatctggccgtggctgtagagccagtcgtcttttcccagatggagactaagctcatcacctggggggcggacaccgccgcctgcggtgacatcatcaacggcttgcccgttctgcccgtaggggccgagagatactgctcggaccggccgacggagcggtctccaaggggtggaggttgctagcgcccatcacggcgtatgcccagcagacaaggggccttttgggatgtataattaccagcctgaccggcgggacaaaaaccaggtggagggtgaggttcagattgtgtctactgctgcccagactttcctggcaacctgcatcaacggggtgtgctggactgtctaccacggggccgggacaaggaccatcgcgtccccaagggtcccgttatccagatgtataccaatgtagaccaagacctcgtaggctggcccgctccctatggtgctcgctcattgacaccctgcacttgcggctcctcggacctttacctggtcacgaggcacgccgatgtcttcccgtacgccggcggggtgatagcaggggcagcctgctttcgcctcgacccatctcttacttgaaaggctcctcggggggcccactactgtgccccgcgggacacgccgtaggcatattcagggcgcggtgtgcacccgtggagtggctaaggcggtggactttatccccgtagagagcctagagacaaccatgaggtccccggtgttcacagacaactcctccccaccagcggtgccccagagcttccaggtggcccacctgcacctcccaccggcagcggtaagagcaccaaggtcccggccgcatacgcggctcagggctacaaggtgctggtgctcaacccctccgttgctgcaacactgggctttggcgcctacatgtccaaggcccagggattgatccgaacatcaggactggggtgaggacaattactactggcagccccatcacgtactccacctacggcaagttcctcgctgacggcgggtgctcagggggtgcttatgacataataatttgtgacgagtgccacccacggatgcaacatccatcttgggcatcggcactgtccttgaccaagcagagacagcgggggcgaggctggttgtgctcgccaccgctacccctccgggctccgtcactgtgccccactctaacatgaggaggttgctctgtccactaccggagagatccccttttacggcaaggctatcccccttgaggcaatcaagggggggagacatctcattttctgccactcaaggaaaaagtgcgacgagctcgccgcaaggctggtcgcgtgggcatcaatgctgtggcctactaccgcggccttgacgtgtccgtcatcccgaccagcggcgacgttgtcgtcgtggcaactgatgccctcatgaccggcttttccggcgacttcgactcggtgatgactgcaacacgtgtgtcacccagacagtcgacttcagccttgaccctaccttcaccattgagacaaccacgcttcctcaggacgctgtttcccgcacccaacgtcggggcaggactggcagggggaagccaggcatctatgatttgtggcaccgggagagcgcccctccggcatgttcgactcgtccgtcctctgtgagtgctatgacgcaggctgtgcttggtatgagctcacacccgccgagaccacagttaggttacgagcgtaatgaacaccccggggcttcccgtgtgccaggaccatcttgaattttgggagggcgtcttcacaggtctcacccatatagacgcccacttcttatctcagacaaagcagagtggggaaaactttccttacctggtagcgtacaagccaccgtgtgcgctagagctcaagctccccccccatcgtgggaccagatgtggaagtgcttgatccgcctcaagcccacccttcatgggccaacacctctgctatacagactgggcgctgttcaaatgaaatcaccctgacgcacccgatcaccaagtacatcatgacatgcatgtcggctgacct

SEQ ID NO: 440 - DNA, 4872 bp, Hepatitis C virus; identical to SEQ ID NO: 421

SEQ ID NO: 441 - DNA, 4872 bp, Hepatitis C virus
tcgcccacaggacgtcaagttcccgggtggcggtcagatcgttggtggagtttacttgttaccgcgcaggggccctagattgggtgtgcgcgcgacgaggaagacttccgagcggtcgcaacctcgagtagacgtcagcctatccccaaggcgcgtcggcccgagggcaggacctgggctcagcccgggtacccttggcccctctatggcaatgagggctgcgggtgggcgggatggctcctgtccccccgtggtctcggcctagctggggccctacagacccccggcgtaggtcgcgcaatttgggtaaggtcatcgataccctcacgtgcggcttcgccgacctcatggggtacattccgctcgtcggcgcgcctcttggaggcgccgccaggccctggcgcatggtgtccgggttctggaggacggcgtgaactatgcaacagggaaccttcctggttgctctttctctatcttccttttggccctgctctcttgcctgactgtacccgcgtcggcctacaagttcgcaactcctcggggctttatcatgtcaccaatgattgccctaactcgagtattgtgtacgagacggccgacgccattctacactctccggggtgtgtcccttgcgtccgcgagggtaacgcctcgaagtgctggtgccggtggcccccacagtggccaccaaggacggcaaactccccacgacgcagcttcgacgtcacatcgatctgcttgtcgggagcgccaccctctgctcggccctctatgtgggggacttgtgcggtctgtcttccttgtcggtcaactgttcactttctcccccagacgccactggacaacgcaagactgcaactgttccatctaccccggccatataacgggccaccgcatggcatgggatatgatgatgaattggtctcctacacagcgctggtaatggctcaactgctcagagtcccgcaagctgtcatggacatgatcgctggagcccactggggagtcctagcgggcatagcgtatttctccatggtggggaactgggcaaaggtcttttggtgctgttgttgtttgccggcgtcgacgcgagcactcgcaccatcggggggtctgctgctgcgaccacgtccggattcgccaagctcttcgctgctggctcccgccagaatgtccagctgatcaacaccaacggaagtggcacatcaatcgcacggccttgaactgtaatgcgagtctcgacactggctgggtagcggggctcttctattaccacaaattcaactcttcgggctgccccgagaggatggccagctgtagacccctgccgatttcgaccagggctggggccctatcagctacgccaacgcaagcggcaccgaccaccccccctactgctggcactaccccccaaagccttgcggtatcgtgccggcacagaacgtatgtggcccagtatattgcttcctcccagccctgtggtggtgggaacgaccgacaagttgggcgtgcccacctacaactggggtagcaatgacacggacgtcttcgtccttaacaacaccaggccaccgttgggcaattggttcggttgacctggatggactcatatggatataccaaagtgtgcggagcgcccccttgtgtcatcggaggggtaggcaataacaccttgcactgccccactgactgtttccgcaagcatccagaagccacatactctcggtgtggctccgtccctggatcacgcccaggtgcctggtccactactcttacaggctttggcattatccttgtactgtcaactacaccctgttcaaagtcaggatgtacgtgggaggggtcgagcacaggctggaggtgcttgcaactggacgcggggcgaacgttgcgatctggacgacagggacaggtccgagctcagcccgctgctgctgtccaccacacagtggcaggttcttccgtgttctttcacgaccttgccagccttgactaccggcctctccacctccaccagaacatcgtggatgtgcaatatttgtacggggtggggtcaagcattgtgtcctgggccatcaagtgggagtacgtcatcctcttgtttctcctgcttgcagacgcgcgcatttgtcctgcttgtggatgatgctactcatatcccaggtggaggcagctttggagaacctcgtgctgctcaacgcggcgtctctgaccggggcgcacggtcttgtgtccttcctcgtgtttttctgctttgcatggtatctgaaggtaggtgggtgcccggagcggcctacgccctctacgggatgtggcctctcctcctgcttctgttggcgttgccccaacgggcatacgcactagacacggaagtggccgcgtcgtgtggtggcgttgtattgtcgggttaatggcgctgactctgtcaccgcactacaagcgctatatcagctggtgcttatggtggctccaatatttcctgactagagtggaagcgcaactgcacgtatgggtcccccccctcaacgtccgaggaggcgcgacgctgtcatcttgctcatgtgtgttatacacccggccttggtatttgacatcaccaagctgctgctggccgtcttcggacccctttggattcttcaaaccagtctgctcaaagtgccctacttgtgcgcgttcagggccttctccggctctgcgcgctagcgcgcaagatggccggaggccattacgtgcaaatggccatcatcaaggtgggggcgcttactggcacctacatctataaccatcttactcctcttcgggattggcgcacaacagcctacgagatctggccgtggctgtagagccagtcgtcttttcccagatggagactaagctcatcacctggggggcggacaccgccgcctgcggtgacatcatcaacggcttgcccgttctgcccgtaggggccgagagatactgctcggaccggccgacggagcggtctccaaggggtggaggttgctagcgcccatcacggcgtatgcccagcagacaaggggccttttgggatgtataattaccagcctgaccggcgggacaaaaaccaggtggagggtgaggttcagattgtgtctactgctgcccagactttcctggcaacctgcatcaacggggtgtgctggactgtctaccacggggccgggacaaggaccatcgcgtccccaagggtcccgttatccagatgtataccaatgtagaccaagacctcgtaggctggcccgctccctatggtgctcgctcattgacaccctgcacttgcggctcctcggacctttacctggtcacgaggcacgccgatgtcttcccgtacgccggcggggtgatagcaggggcagcctgctttcgcctcgacccatctcttacttgaaaggctcctcggggggcccactactgtgccccgcgggacacgccgtaggcatattcagggcgcggtgtgcacccgtggagtggctaaggcggtggactttatccccgtagagagcctagagacaaccatgaggtccccggtgttcacagacaactcctccccaccagcggtgccccagagcttccaggtggcccacctgcacctcccaccggcagcggtaagagcaccaaggtcccggccgcatacgcggctcagggctacaaggtgctggtgctcaacccctccgttgctgcaacactgggctttggcgcctacatgtccaaggcccagggattgatccgaacatcaggactggggtgaggacaattactactggcagccccatcacgtactccacctacggcaagttcctcgctgacggcgggtgctcagggggtgcttatgacataataatttgtgacgagtgccacccacggatgcaacatccatcttgggcatcggcactgtccttgaccaagcagagacagcgggggcgaggctggttgtgctcgccaccgctacccctccgggctccgtcactgtgccccactctaacatgaggaggttgctctgtccactaccggagagatccccttttacggcaaggctatcccccttgaggcaatcaagggggggagacatctcattttctgccactcaaggaaaaagtgcgacgagctcgccgcaaggctggtcgcgtgggcatcaatgctgtggcctactaccgcggccttgacgtgtccgtcatcccgaccagcggcgacgttgtcgtcgtggcaactgatgccctcatgaccggcttttccggcgacttcgactcggtgatgactgcaacacgtgtgtcacccagacagtcgacttcagccttgaccctaccttcaccattgagacaaccacgcttcctcaggacgctgtttcccgcacccaacgtcggggcaggactggcagggggaagccaggcatctatgatttgtggcaccgggagagcgcccctccggcatgttcgactcgtccgtcctctgtgagtgctatgacgcaggctgtgcttggtatgagctcacacccgccgagaccacagttaggttacgagcgtaatgaacaccccggggcttcccgtgtgccaggaccatcttgaattttgggagggcgtcttcacaggtctcacccatatagacgcccacttcttatctcagacaaagcagagtggggaaaactttccttacctggtagcgtacaagccaccgtgtgcgctagagctcaagctccccccccatcgtgggaccagatgtggaagtgcttgatccgcctcaagcccacccttcatgggccaacacctctgctatacagactgggcgctgttcaaatgaaatcaccctgacgcacccgatcaccaagtacatcatgacatgcatgtcggctgacct

SEQ ID NO: 442 - DNA, 4872 bp, Hepatitis C virus
tcgcccacaggacgtcaagttcccgggtggcggtcagatcgttggtggagtttacttgttaccgcgcaggggccctagattgggtgtgcgcgcgacgaggaagacttccgagcggtcgcaacctcgagtagacgtcagcctatccccaaggcgcgtcggcccgagggcaggacctgggctcagcccgggtacccttggcccctctatggcaatgagggctgcgggtgggcgggatggctcctgtccccccgtggtctcggcctagctggggccctacagacccccggcgtaggtcgcgcaatttgggtaaggtcatcgataccctcacgtgcggcttcgccgacctcatggggtacattccgctcgtcggcgcgcctcttggaggcgccgccaggccctggcgcatggtgtccgggttctggaggacggcgtgaactatgcaacagggaaccttcctggttgctctttctctatcttccttttggccctgctctcttgcctgactgtacccgcgtcggcctacaagttcgcaactcctcggggctttatcatgtcaccaatgattgccctaactcgagtattgtgtacgagacggccgacgccattctacactctccggggtgtgtcccttgcgtccgcgagggtaacgcctcgaagtgctggtgccggtggcccccacagtggccaccaaggacggcaaactccccacgacgcagcttcgacgtcacatcgatctgcttgtcgggagcgccaccctctgctcggccctctatgtgggggacttgtgcggtctgtcttccttgtcggtcaactgttcactttctcccccagacgccactggacaacgcaagactgcaactgttccatctaccccggccatataacgggccaccgcatggcatgggatatgatgatgaattggtctcctacacagcgctggtaatggctcaactgctcagagtcccgcaagctgtcatggacatgatcgctggagcccactggggagtcctagcgggcatagcgtatttctccatggtggggaactgggcaaaggtcttttggtgctgttgttgtttgccggcgtcgacgcgagcactcgcaccatcgggaggtctgctgctgcgaccacgtccggattcgccaagctcttcgctgctggctcccgccagaatgtccagctgatcaacaccaacggaagtggcacatcaatcgcacggccttgaactgtaatgcgagtctcgacactggctgggtagcggggctcttctattaccacaaattcaactcttcgggctgccccgagaggatggccagctgtagacccctgccgatttcgaccagggctggggccctatcagctacgccaacgcaagcggcaccgaccaccccccctactgctggcactaccccccaaagccttgcggtatcgtgccggcacagaacgtatgtggcccagtatattgcttcctcccagccctgtggtggtgggaacgaccgacaagttgggcgtgcccacctacaactggggtagcaatgacacggacgtcttcgtccttaacaacaccaggccaccgttgggcaattggttcggttgacctggatggactcatatggatataccaaagtgtgcggagcgcccccttgtgtcatcggaggggtaggcaataacaccttgcactgccccactgactgtttccgcaagcatccagaagccacatactctcggtgtggctccgtccctggatcacgcccaggtgcctggtccactactcttacaggctttggcattatccttgtactgtcaactacaccctgttcaaagtcaggatgtacgtgggaggggtcgagcacaggctggaggtgcttgcaactggacgcggggcgaacgttgcgatctggacgacagggacaggtccgagctcagcccgctgctgctgtccaccacacagtggcaggttcttccgtgttctttcacgaccttgccagccttgactaccggcctctccacctccaccagaacatcgtggatgtgcaatatttgtacggggtggggtcaagcattgtgtcctgggccatcaagtgggagtacgtcatcctcttgtttctcctgcttgcagacgcgcgcatttgtcctgcttgtggatgatgctactcatatcccaggtggaggcagctttggagaacctcgtgctgctcaacgcggcgtctctgaccggggcgcacggtcttgtgtccttcctcgtgtttttctgctttgcatggtatctgaaggtaggtgggtgcccggagcggcctacgccctctacgggatgtggcctctcctcctgcttctgttggcgttgccccaacgggcatacgcactagacacggaagtggccgcgtcgtgtggtggcgttgtattgtcgggttaatggtgctgactctgtcaccgcactacaagcgctatatcagctggtgcttatggtggctccaatatttcctgactagagtggaagcgcaactgcacgtatgggtcccccccctcaacgtccgaggaggcgcgacgctgtcatcttgctcatgtgtgttatacacccggccttggtatttgacatcaccaagctgctgctggccgtcttcggacccctttggattcttcaaaccagtctgctcaaagtgccctacttgtgcgcgttcagggccttctccggctctgcgcgctagcgcgcaagatggccggaggccattacgtgcaaatggccatcatcaaggtgggggcgcttactggcacctacatctataaccatcttactcctcttcgggattggcgcacaacagcctacgagatctggccgtggctgtagagccagtcgtcttttcccagatggagactaagctcatcacctggggggcggacaccgccgcctgcggtgacatcatcaacggcttgcccgttctgcccgtaggggccgagagatactgctcggaccggccgacggagcggtctccaaggggtggaggttgctagcgcccatcacggcgtatgcccagcagacaaggggccttttgggatgtataattaccagcctgaccggcgggacaaaaaccaggtggagggtgaggttcagattgtgtctactgctgcccagactttcctggcaacctgcatcaacggggtgtgctggactgtctaccacggggccgggacaaggaccatcgcgtccccaagggtcccgttatccagatgtataccaatgtagaccaagacctcgtaggctggcccgctccctatggtgctcgctcattgacaccctgcacttgcggctcctcggacctttacctggtcacgaggcacgccgatgtcttcccgtacgccggcggggtgatagcaggggcagcctgctttcgcctcgacccatctcttacttgaaaggctcctcggggggcccactactgtgccccgcgggacacgccgtaggcatattcagggcgcggtgtgcacccgtggagtggctaaggcggtggactttatccccgtagagagcctagagacaaccatgaggtccccggtgttcacagacaactcctccccaccagcggtgccccagagcttccaggtggcccacctgcacctcccaccggcagcggtaagagcaccaaggtcccggccgcatacgcggctcagggctacaaggtgctggtgctcaacccctccgttgctgcaacactgggctttggcgcctacgtgtccaaggcccagggattgatccgaacatcaggactggggtgaggacaattactactggcagccccatcacgtactccacctacggcaagttcctcgctgacggcgggtgctcagggggtgcttatgacataataatttgtgacgagtgccacccacggatgcaacatccatcttgggcatcggcactgtccttgaccaagcagagacagcgggggcgaggctggttgtgctcgccaccgctacccctccgggctccgtcactgtgccccactctaacatgaggaggttgctctgtccactaccggagagatccccttttacggcaaggctatcccccttgaggcaatcaagggggggagacatctcattttctgccactcaaggaaaaagtgcgacgagctcgccgcaaggctggtcgcgtgggcatcaatgctgtggcctactaccgcggccttgacgtgtccgtcatcccgaccagcggcgacgttgtcgtcgtggcaactgatgccctcatgaccggcttttccggcgacttcgactcggtgatgactgcaacacgtgtgtcacccagacagtcgacttcagccttgaccctaccttcaccattgagacaaccacgcttcctcaggacgctgtttcccgcacccaacgtcggggcaggactggcagggggaagccaggcatctatgatttgtggcaccgggagagcgcccctccggcatgttcgactcgtccgtcctctgtgagtgctatgacgcaggctgtgcttggtatgagctcacacccgccgagaccacagttaggttacgagcgtaatgaacaccccggggcttcccgtgtgccaggaccatcttgaattttgggagggcgtcttcacaggtctcacccatatagacgcccacttcttatctcagacaaagcagagtggggaaaactttccttacctggtagcgtacaagccaccgtgtgcgctagagctcaagctccccccccatcgtgggaccagatgtggaagtgcttgatccgcctcaagcccacccttcatgggccaacacctctgctatacagactgggcgctgttcaaatgaaatcaccctgacgcacccgatcaccaagtacatcatgacatgcatgtcggctgacct

SEQ ID NO: 443 - DNA, 4872 bp, Hepatitis C virus
tcgcccacaggacgtcaagttcccgggtggcggtcagatcgttggtggagtttacttgttaccgcgcaggggccctagattgggtgtgcgcgcgacgaggaagacttccgagcggtcgcaacctcgagtagacgtcagcctatccccaaggcgcgtcggcccgagggcaggacctgggctcagcccgggtacccttggcccctctatggcaatgagggctgcgggtgggcgggatggctcctgtccccccgtggtctcggcctagctggggccctacagacccccggcgtaggtcgcgcaatttgggtaaggtcatcgataccctcacgtgcggcttcgccgacctcatggggtacattccgctcgtcggcgcgcctcttggaggcgccgccaggccctggcgcatggtgtccgggttctggaggacggcgtgaactatgcaacagggaaccttcctggttgctctttctctatcttccttttggccctgctctcttgcctgactgtacccgcgtcggcctacaagttcgcaactcctcggggctttatcatgtcaccaatgattgccctaactcgagtattgtgtacgagacggccgacgccattctacactctccggggtgtgtcccttgcgtccgcgagggtaacgcctcgaagtgctggtgccggtggcccccacagtggccaccaaggacggcaaactccccacgacgcagcttcgacgtcacatcgatctgcttgtcgggagcgccaccctctgctcggccctctatgtgggggacttgtgcggtctgtcttccttgtcggtcaactgttcactttctcccccagacgccactggacaacgcaagactgcaactgttccatctaccccggccatataacgggccaccgcatggcatgggatatgatgatgaattggtctcctacacagcgctggtaatggctcaactgctcagagtcccgcaagctgtcatggacatgatcgctggagcccactggggagtcctagcgggcatagcgtatttctccatggtggggaactgggcaaaggtcttttggtgctgttgttgtttgccggcgtcgacgcgagcactcgcaccatcggggggtctgctgctgcgaccacgtccggattcgccaagctcttcgctgctggctcccgccagaatgtccagctgatcaacaccaacggaagtggcacatcaatcgcacggccttgaactgtaatgcgagtctcgacactggctgggtagcggggctcttctattaccacaaattcaactcttcgggctgccccgagaggatggccagctgtagacccctgccgatttcgaccagggctggggccctatcagctacgccaacgcaagcggcaccgaccaccccccctactgctggcactaccccccaaagccttgcggtatcgtgccggcacagaacgtatgtggcccagtatattgcttcctcccagccctgtggtggtgggaacgaccgacaagttgggcgtgcccacctacaactggggtagcaatgacacggacgtcttcgtccttaacaacaccaggccaccgttgggcaattggttcggttgacctggatggactcatatggatataccaaagtgtgcggagcgcccccttgtgtcatcggaggggtaggcaataacaccttgcactgccccactgactgtttccgcaagcatccagaagccacatactctcggtgtggctccgtccctggatcacgcccaggtgcctggtccactactcttacaggctttggcattatccttgtactgtcaactacaccctgttcaaagtcaggatgtacgtgggaggggtcgagcacaggctggaggtgcttgcaactggacgcggggcgaacgttgcgatctggacgacagggacaggtccgagctcagcccgctgctgctgtccaccacacagtggcaggttcttccgtgttctttcacgaccttgccagccttgactaccggcctctccacctccaccagaacatcgtggatgtgcaatatttgtacggggtggggtcaagcattgtgtcctgggccatcaagtgggagtacgtcatcctcttgtttctcctgcttgcagacgcgcgcatttgtcctgcttgtggatgatgctactcatatcccaggtggaggcagctttggagaacctcgtgctgctcaacgcggcgtctctgaccggggcgcacggtcttgtgtccttcctcgtgtttttctgctttgcatggtatctgaaggtaggtgggtgcccggagcggcctacgccctctacgggatgtggcctctcctcctgcttctgttggcgttgccccaacgggcatacgcactagacacggaagtggccgcgtcgtgtggtggcgttgtattgtcgggttaatggtgctgactctgtcaccgcactacaagcgctatatcagctggtgcttatggtggctccaatatttcctgactagagtggaagcgcaactgcacgtatgggtcccccccctcaacgtccgaggaggcgcgacgctgtcatcttgctcatgtgtgttatacacccggccttggtatttgacatcaccaagctgctgctggccgtcttcggacccctttggattcttcaaaccagtctgctcaaagtgccctacttgtgcgcgttcagggccttctccggctctgcgcgctagcgcgcaagatggccggaggccattacgtgcaaatggccatcatcaaggtgggggcgcttactggcacctacatctataaccatcttactcctcttcgggattggcgcacaacagcctacgagatctggccgtggctgtagagccagtcgtcttttcccagatggagactaagctcatcacctggggggtggacaccgccgcctgcggtgacatcatcaacggcttgcccgttctgcccgtaggggccgagagatactgctcggaccggccgacggagcggtctccaaggggtggaggttgctagcgcccatcacggcgtatgcccagcagacaaggggccttttgggatgtataattaccagcctgaccggcgggacaaaaaccaggtggagggtgaggttcagattgtgtctactgctgcccagactttcctggcaacctgcatcaacggggtgtgctggactgtctaccacggggccgggacaaggaccatcgcgtccccaagggtcccgttatccagatgtataccaatgtagaccaagacctcgtaggctggcccgctccctatggtgctcgctcattgacaccctgcacttgcggctcctcggacctttacctggtcacgaggcacgccgatgtcttcccgtacgccggcggggtgatagcaggggcagcctgctttcgcctcgacccatctcttacttgaaaggctcctcggggggcccactactgtgccccgcgggacacgccgtaggcatattcagggcgcggtgtgcacccgtggagtggctaaggcggtggactttatccccgtagagagcctagagacaaccatgaggtccccggtgttcacagacaactcctccccaccagcggtgccccagagcttccaggtggcccacctgcacctcccaccggcagcggtaagagcaccaaggtcccggccgcatacgcggctcagggctacaaggtgctggtgctcaacccctccgttgctgcaacactgggctttggcgcctacatgtccaaggcccagggattgatccgaacatcaggactggggtgaggacaattactactggcagccccatcacgtactccacctacggcaagttcctcgctgacggcgggtgctcagggggtgcttatgacataataatttgtgacgagtgccacccacggatgcaacatccatcttgggcatcggcactgtccttgaccaagcagagacagcgggggcgaggctggttgtgctcgccaccgctacccctccgggctccgtcactgtgccccactctaacatgaggaggttgctctgtccactaccggagagatccccttttacggcaaggctatcccccttgaggcaatcaagggggggagacatctcattttctgccactcaaggaaaaagtgcgacgagctcgccgcaaggctggtcgcgtgggcatcaatgctgtggcctactaccgcggccttgacgtgtccgtcatcccgaccagcggcgacgttgtcgtcgtggcaactgatgccctcatgaccggcttttccggcgacttcgactcggtgatgactgcaacacgtgtgtcacccagacagtcgacttcagccttgaccctaccttcaccattgagacaaccacgcttcctcaggacgctgtttcccgcacccaacgtcggggcaggactggcagggggaagccaggcatctatgatttgtggcaccgggagagcgcccctccggcatgttcgactcgtccgtcctctgtgagtgctatgacgcaggctgtgcttggtatgagctcacacccgccgagaccacagttaggttacgagcgtaatgaacaccccggggcttcccgtgtgccaggaccatcttgaattttgggagggcgtcttcacaggtctcacccatatagacgcccacttcttatctcagacaaagcagagtggggaaaactttccttacctggtagcgtacaagccaccgtgtgcgctagagctcaagctccccccccatcgtgggaccagatgtggaagtgcttgatccgcctcaagcccacccttcatgggccaacacctctgctatacagactgggcgctgttcaaatgaaatcaccctgacgcacccgatcaccaagtacatcatgacatgcatgtcggctgacct

SEQ ID NO: 444 - DNA, 4872 bp, Hepatitis C virus
tcgcccacaggacgtcaagttcccgggtggcggtcagatcgttggtggagtttacttgttaccgcgcaggggccctagattgggtgtgcgcgcgacgaggaagacttccgagcggtcgcaacctcgagtagacgtcagcctatccccaaggcgcgtcggcccgagggcaggacctgggctcagcccgggtacccttggcccctctatggcaatgagggctgcgggtgggcgggatggctcctgtccccccgtggtctcggcctagctggggccctacagacccccggcgtaggtcgcgcaatttgggtaaggtcatcgataccctcacgtgcggcttcgccgacctcatggggtacattccgctcgtcggcgcgcctcttggaggcgccgccaggccctggcgcatggtgtccgggttctggaggacggcgtgaactatgcaacagggaaccttcctggttgctctttctctatcttccttttggccctgctctcttgcctgactgtacccgcgtcggcctacaagttcgcaactcctcggggctttatcatgtcaccaatgattgccctaactcgagtattgtgtacgagacggccgacgccattctacactctccggggtgtgtcccttgcgtccgcgagggtaacgcctcgaagtgctggtgccggtggcccccacagtggccaccaaggacggcaaactccccacgacgcagcttcgacgtcacatcgatctgcttgtcgggagcgccaccctctgctcggccctctatgtgggggacttgtgcggtctgtcttccttgtcggtcaactgttcactttctcccccagacgccactggacaacgcaagactgcaactgttccatctaccccggccatataacgggccaccgcatggcatgggatatgatgatgaattggtctcctacacagcgctggtaatggctcaactgctcagagtcccgcaagctgtcatggacatgatcgctggagcccactggggagtcctagcgggcatagcgtatttctccatggtggggaactgggcaaaggtcttttggtgctgttgttgtttgccggcgtcgacgcgagcactcgcaccatcggggggtctgctgctgcgaccacgtccggattcgccaagctcttcgctgctggctcccgccagaatgtccagctgatcaacaccaacggaagtggcacatcaatcgcacggccttgaactgtaatgcgagtctcgacactggctgggtagcggggctcttctattaccacaaattcaactcttcgggctgccccgagaggatggccagctgtagacccctgccgatttcgaccagggctggggccctatcagctacgccaacgcaagcggcaccgaccaccccccctactgctggcactaccccccaaagccttgcggtatcgtgccggcacagaacgtatgtggcccagtatattgcttcctcccagccctgtggtggtgggaacgaccgacaagttgggcgtgcccacctacaactggggtagcaatgacacggacgtcttcgtccttaacaacaccaggccaccgttgggcaattggttcggttgacctggatggactcatatggatataccaaagtgtgcggagcgcccccttgtgtcatcggaggggtaggcaataacaccttgcactgccccactgactgtttccgcaagcatccagaagccacatactctcggtgtggctccgtccctggatcacgcccaggtgcctggtccactactcttacaggctttggcattatccttgtactgtcaactacaccctgttcaaagtcaggatgtacgtgggaggggtcgagcacaggctggaggtgcttgcaactggacgcggggcgaacgttgcgatctggacgacagggacaggtccgagctcagcccgctgctgctgtccaccacacagtggcaggttcttccgtgttctttcacgaccttgccagccttgactaccggcctctccacctccaccagaacatcgtggatgtgcaatatttgtacggggtggggtcaagcattgtgtcctgggccatcaagtgggagtacgtcatcctcttgtttctcctgcttgcagacgcgcgcatttgtcctgcttgtggatgatgctactcatatcccaggtggaggcagctttggagaacctcgtgctgctcaacgcggcgtctctgaccggggcgcacggtcttgtgtccttcctcgtgtttttctgctttgcatggtatctgaaggtaggtgggtgcccggagcggcctacgccctctacgggatgtggcctctcctcctgcttctgttggcgttgccccaacgggcatacgcactagacacggaagtggccgcgtcgtgtggtggcgttgtattgtcgggttaatggtgctgactctgtcaccgcactacaagcgctatatcagctggtgcttatggtggctccaatatttcctgactagagtggaagcgcaactgcacgtatgggtcccccccctcaacgtccgaggaggcgcgacgctgtcatcttgctcatgtgtgttatacacccggccttggtatttgacatcaccaagctgctgctggccgtcttcggacccctttggattcttcaaaccagtctgctcaaagtgccctacttgtgcgcgttcagggccttctccggctctgcgcgctagcgcgcaagatggccggaggccattacgtgcaaatggccatcatcaaggtgggggcgcttactggcacctacatctataaccatcttactcctcttcgggattggcgcacaacagcctacgagatctggccgtggctgtagagccagtcgtcttttcccagatggagactaagctcatcacctggggggcggacaccgccgcctgcggtgacatcatcaacggcttgcccgttctgcccgtaggggccgagagatactgctcggaccggccgacggagcggtctccaaggggtggaggttgctagcgcccatcacggcgtatgcccagcagacaaggggccttttgggatgtataattaccagcctgaccggcgggacaaaaaccaggtggagggtgaggttcagattgtgtctactgctgcccagactttcctggcaacctgcatcaacggggtgtgctggactgtctaccacggggccgggacaaggaccatcgcgtccccaagggtcccgttatccagatgtataccaatgtagaccaagacctcgtaggctggcccgctccctatggtgctcgctcattgacaccctgcacttgcggctcctcggacctttacctggtcacgaggcacgccgatgtcttcccgtacgccggcggggtgatagcaggggcagcctgctttcgcctcgacccatctcttacttgaaaggctcctcggggggcccactactgtgccccgcgggacacgccgtaggcatattcagggcgcggtgtgcacccgtggagtggctaaggcggtggactttatccccgtagagagcctagagacaaccatgaggtccccggtgttcacagacaactcctccccaccagcggtgccccagagcttccaggtggcccacctgcacctcccaccggcagcggtaagagcaccaaggtcccggccgcatacgcggctcagggctacaaggtgctggtgctcaacccctccgttgctgcaacactgggctttggcgcctacatgtccaaggcccagggattgatccgaacatcaggactggggtgaggacaattactactggcagccccatcacgtactccacctacggcaagttcctcgctgacggcgggtgctcagggggtgcttatgacataataatttgtgacgagtgccacccacggatgcaacatccatcttgggcatcggcactgtccttgaccaagcagagacagcgggggcgaggctggttgtgctcgccaccgctacccctccgggctccgtcactgtgccccactctaacatgaggaggttgctctgtccactaccggagagatccccttttacggcaaggctatcccccttgaggcaatcaagggggggagacatctcattttctgccactcaaggaaaaagtgcgacgagctcgccgcaaggctggtcgcgtgggcatcaatgctgtggcctactaccgcggccttgacgtgtccgtcatcccgaccagcggcgacgttgtcgtcgtggcaactgatgccctcatgaccggcttttccggcgacttcgactcggtgatgactgcaacacgtgtgtcacccagacagtcgacttcagccttgaccctaccttcaccattgagacaaccacgcttcctcaggacgctgtttcccgcacccaacgtcggggcaggactggcagggggaagccaggcatctatgatttgtggcaccgggagagcgcccctccggcatgttcgactcgtccgtcctctgtgagtgctatgacgcaggctgtgcttggtatgagctcacacccrccgagaccacagttaggttacgagcgtaatgaacaccccggggcttcccgtgtgccaggaccatcttgaattttgggagggcgtcttcacaggtctcacccatatagacgcccacttcttatctcagacaaagcagagtggggaaaactttccttacctggtagcgtacaagccaccgtgtgcgctagagctcaagctccccccccatcgtgggaccagatgtggaagtgcttgatccgcctcaagcccacccttcatgggccaacacctctgctatacagactgggcgctgttcaaatgaaatcaccctgacgcacccgatcaccaagtacatcatgacatgcatgtcggctgacct

SEQ ID NO: 445 - DNA, 4872 bp, Hepatitis C virus
tcgcccacaggacgtcaagttcccgggtggcggtcagatcgttggtggagtttacttgttaccgcgcaggggccctagattgggtgtgcgcgcgacgaggaagacttccgagcggtcgcaacctcgagtagacgtcagcctatccccaaggcgcgtcggcccgagggcaggacctgggctcagcccgggtacccttggcccctctatggcaatgagggctgcgggtgggcgggatggctcctgtccccccgtggtctcggcctagctggggccctacagacccccggcgtaggtcgcgcaatttgggtaaggtcatcgataccctcacgtgcggcttcgccgacctcatggggtacattccgctcgtcggcgcgcctcttggaggcgccgccaggccctggcgcatggtgtccgggttctggaggacggcgtgaactatgcaacagggaaccttcctggttgctctttctctatcttccttttggccctgctctcttgcctgactgtacccgcgtcggcctacaagttcgcaactcctcggggctttatcatgtcaccaatgattgccctaactcgagtattgtgtacgagacgaccgacgccattctacactctccggggtgtgtcccttgcgtccgcgagggtaacgcctcgaagtgctggtgccggtggcccccacagtggccaccaaggacggcaaactccccacgacgcagcttcgacgtcacatcgatctgcttgtcgggagcgccaccctctgctcggccctctatgtgggggacttgtgcggtctgtcttccttgtcggtcaactgttcactttctcccccagacgccactggacaacgcaagactgcaactgttccatctaccccggccatataacgggccaccgcatggcatgggatatgatgatgaattggtctcctacacagcgctggtaatggctcaactgctcagagtcccgcaagctgtcatggacatgatcgctggagcccactggggagtcctagcgggcatagcgtatttctccatggtggggaactgggcaaaggtcttttggtgctgttgttgtttgccggcgtcgacgcgagcactcgcaccatcggggggtctgctgctgcgaccacgtccggattcgccaagctcttcgctgctggctcccgccagaatgtccagctgatcaacaccaacggaagtggcacatcaatcgcacggccttgaactgtaatgcgagtctcgacactggctgggtagcggggctcttctattaccacaaattcaactcttcgggctgccccgagaggatggccagctgtagacccctgccgatttcgaccagggctggggccctatcagctacgccaacgcaagcggcaccgaccaccccccctactgctggcactaccccccaaagccttgcggtatcgtgccggcacagaacgtatgtggcccagtatattgcttcctcccagccctgtggtggtgggaacgaccgacaagttgggcgtgcccacctacaactggggtagcaatgacacggacgtcttcgtccttaacaacaccaggccaccgttgggcaattggttcggttgacctggatggactcatatggatataccaaagtgtgcggagcgcccccttgtgtcatcggaggggtaggcaataacaccttgcactgccccactgactgtttccgcaagcatccagaagccacatactctcggtgtggctccgtccctggatcacgcccaggtgcctggtccactactcttacaggctttggcattatccttgtactgtcaactacaccctgttcaaagtcaggatgtacgtgggaggggtcgagcacaggctggaggtgcttgcaactggacgcggggcgaacgttgcgatctggacgacagggacaggtccgagctcagcccgctgctgctgtccaccacacagtggcaggttcttccgtgttctttcacgaccttgccagccttgactaccggcctctccacctccaccagaacatcgtggatgtgcaatatttgtacggggtggggtcaagcattgtgtcctgggccatcaagtgggagtacgtcatcctcttgtttctcctgcttgcagacgcgcgcatttgtcctgcttgtggatgatgctactcatatcccaggtggaggcagctttggagaacctcgtgctgctcaacgcggcgtctctgaccggggcgcacggtcttgtgtccttcctcgtgtttttctgctttgcatggtatctgaaggtaggtgggtgcccggagcggcctacgccctctacgggatgtggcctctcctcctgcttctgttggcgttgccccaacgggcatacgcactagacacggaagtggccgcgtcgtgtggtggcgttgtattgtcgggttaatggtgctgactctgtcaccgcactacaagcgctatatcagctggtgcttatggtggctccaatatttcctgactagagtggaagcgcaactgcacgtatgggtcccccccctcaacgtccgaggaggcgcgacgctgtcatcttgctcatgtgtgttatacacccggccttggtatttgacatcaccaagctgctgctggccgtcttcggacccctttggattcttcaaaccagtctgctcaaagtgccctacttgtgcgcgttcagggccttctccggctctgcgcgctagcgcgcaagatggccggaggccattacgtgcaaatggccatcatcaaggtgggggcgcttactggcacctacatctataaccatcttactcctcttcgggattggcgcacaacagcctacgagatctggccgtggctgtagagccagtcgtcttttcccagatggagactaagctcatcacctggggggcggacaccgccgcctgcggtgacatcatcaacggcttgcccgttctgcccgtaggggccgagagatactgctcggaccggccgacggagcggtctccaaggggtggaggttgctagcgcccatcacggcgtatgcccagcagacaaggggccttttgggatgtataattaccagcctgaccggcgggacaaaaaccaggtggagggtgaggttcagattgtgtctactgctgcccagactttcctggcaacctgcatcaacggggtgtgctggactgtctaccacggggccgggacaaggaccatcgcgtccccaagggtcccgttatccagatgtataccaatgtagaccaagacctcgtaggctggcccgctccctatggtgctcgctcattgacaccctgcacttgcggctcctcggacctttacctggtcacgaggcacgccgatgtcttcccgtacgccggcggggtgatagcaggggcagcctgctttcgcctcgacccatctcttacttgaaaggctcctcggggggcccactactgtgccccgcgggacacgccgtaggcatattcagggcgcggtgtgcacccgtggagtggctaaggcggtggactttatccccgtagagagcctagagacaaccatgaggtccccggtgttcacagacaactcctccccaccagcggtgccccagagcttccaggtggcccacctgcacctcccaccggcagcggtaagagcaccaaggtcccggccgcatacgcggctcagggctacaaggtgctggtgctcaacccctccgttgctgcaacactgggctttggcgcctacatgtccaaggcccagggattgatccgaacatcaggactggggtgaggacaattactactggcagccccatcacgtactccacctacggcaagttcctcgctgacggcgggtgctcagggggtgcttatgacataataatttgtgacgagtgccacccacggatgcaacatccatcttgggcatcggcactgtccttgaccaagcagagacagcgggggcgaggctggttgtgctcgccaccgctacccctccgggctccgtcactgtgccccactctaacatgaggaggttgctctgtccactaccggagagatccccttttacggcaaggctatcccccttgaggcaatcaagggggggagacatctcattttctgccactcaaggaaaaagtgcgacgagctcgccgcaaggctggtcgcgtgggcatcaatgctgtggcctactaccgcggccttgacgtgtccgtcatcccgaccagcggcgacgttgtcgtcgtggcaactgatgccctcatgaccggcttttccggcgacttcgactcggtgatgactgcaacacgtgtgtcacccagacagtcgacttcagccttgaccctaccttcaccattgagacaaccacgcttcctcaggacgctgtttcccgcacccaacgtcggggcaggactggcagggggaagccaggcatctatgatttgtggcaccgggagagcgcccctccggcatgttcgactcgtccgtcctctgtgagtgctatgacgcaggctgtgcttggtatgagctcacacccgccgagaccacagttaggttgcgagcgtaatgaacaccccggggcttcccgtgtgccaggaccatcttgaattttgggagggcgtcttcacaggtctcacccatatagacgcccacttcttatctcagacaaagcagagtggggaaaactttccttacctggtagcgtacaagccaccgtgtgcgctagagctcaagctccccccccatcgtgggaccagatgtggaagtgcttgatccgcctcaagcccacccttcatgggccaacacctctgctatacagactgggcgctgttcaaatgaaatcaccctgacgcacccgatcaccaagtacatcatgacatgcatgtcggctgacct

SEQ ID NO: 446 - DNA, 4872 bp, Hepatitis C virus
tcgcccacaggacgtcaagttcccgggtggcggtcagatcgttggtggagtttacttgttaccgcgcaggggccctagattgggtgtgcgcgcgacgaggaagacttccgagcggtcgcaacctcgagtagacgtcagcctatccccaaggcgcgtcggcccgagggcaggacctgggctcagcccgggtacccttggcccctctatggcaatgagggctgcgggtgggcgggatggctcctgtccccccgtggtctcggcctagctggggccctacagacccccggcgtaggtcgcgcaatttgggtaaggtcatcgataccctcacgtgcggcttcgccgacctcatggggtacattccgctcgtcggcgcgcctcttggaggcgccgccaggccctggcgcatggtgtccgggttctggaggacggcgtgaactatgcaacagggaaccttcctggttgctctttctctatcttccttttggccctgctctcttgcctgactgtacccgcgtcggcctacaagttcgcaactcctcggggctttatcatgtcaccaatgattgccctaactcgagtattgtgtacgagacggccgacgccattctacactctccggggtgtgtcccttgcgtccgcgagggtaacgcctcgaagtgctggtgccggtggcccccacagtggccaccaaggacggcaaactccccacgacgcagcttcgacgtcacatcgatctgcttgtcgggagcgccaccctctgctcggccctctatgtgggggacttgtgcggtctgtcttccttgtcggtcaactgttcactttctcccccagacgccactggacaacgcaagactgcaactgttccatctaccccggccatataacgggccaccgcatggcatgggatatgatgatgaattggtctcctacacagcgctggtaatggctcaactgctcagagtcccgcaagctgtcatggacatgatcgctggagcccactggggagtcctagcgggcatagcgtatttctccatggtggggaactgggcaaaggtcttttggtgctgttgttgtttgccggcgtcgacgcgagcactcgcaccatcggggggtctgctgctgcgaccacgtccggattcgccaagctcttcgctgctggctcccgccagaatgtccagctgatcaacaccaacggaagtggcacatcaatcgcacggccttgaactgtaatgcgagtctcgacactggctgggtagcggggctcttctattaccacaaattcaactcttcgggctgccccgagaggatggccagctgtagacccctgccgatttcgaccagggctggggccctatcagctatgccaacgcaagcggcaccgaccaccccccctactgctggcactaccccccaaagccttgcggtatcgtgccggcacagaacgtatgtggcccagtatattgcttcctcccagccctgtggtggtgggaacgaccgacaagttgggcgtgcccacctacaactggggtagcaatgacacggacgtcttcgtccttaacaacaccaggccaccgttgggcaattggttcggttgacctggatggactcatatggatataccaaaatgtgcggagcgcccccttgtgtcatcggaggggtaggcaataacaccttgcactgccccactgactgtttccgcaagcatccagaagccacatactctcggtgtggctccgtccctggatcacgcccaggtgcctggtccactactcttacaggctttggcattatccttgtactgtcaactacaccctgttcaaagtcaggatgtacgtgggaggggtcgagcacaggctggaggtgcttgcaactggacgcggggcgaacgttgcgatctggacgacagggacaggtccgagctcagcccgctgctgctgtccaccacacagtggcaggttcttccgtgttctttcacgaccttgccagccttgactaccggcctctccacctccaccagaacatcgtggatgtgcaatatttgtacggggtggggtcaagcattgtgtcctgggccatcaagtgggagtacgtcatcctcttgtttctcctgcttgcagacgcgcgcatttgtcctgcttgtggatgatgctactcatatcccaggtggaggcagctttggagaacctcgtgctgctcaacgcggcgtctctgaccggggcgcacggtcttgtgtccttcctcgtgtttttctgctttgcatggtatctgaaggtaggtgggtgcccggagcggcctacgccctctacgggatgtggcctctcctcctgcttctgttggcgttgccccaacgggcatacgcactagacacggaagtggccgcgtcgtgtggtggcgttgtattgtcgggttaatggtgctgactctgtcaccgcactacaagcgctatatcagctggtgcttatggtggctccaatatttcctgactagagtggaagcgcaactgcacgtatgggtcccccccctcaacgtccgaggaggcgcgacgctgtcatcttgctcatgtgtgttatacacccggccttggtatttgacatcaccaagctgctgctggccgtcttcggacccctttggattcttcaaaccagtctgctcaaagtgccctacttgtgcgcgttcagggccttctccggctctgcgcgctagcgcgcaagatggccggaggccattacgtgcaaatggccatcatcaaggtgggggcgcttactggcacctacatctataaccatcttactcctcttcgggattggcgcacaacagcctacgagatctggccgtggctgtagagccagtcgtcttttcccagatggagactaagctcatcacctggggggcggacaccgccgcctgcggtgacatcatcaacggcttgcccgttctgcccgtaggggccgagagatactgctcggaccggccgacggagcggtctccaaggggtggaggttgctagcgcccatcacggcgtatgcccagcagacaagaggccttttgggatgtataattaccagcctgaccggcgggacaaaaaccaggtggagggtgaggttcagattgtgtctactgctgcccagactttcctggcaacctgcatcaacggggtgtgctggactgtctaccacggggccgggacaaggaccatcgcgtccccaagggtcccgttatccagatgtataccaatgtagaccaagacctcgtaggctggcccgctccctatggtgctcgctcattgacaccctgcacttgcggctcctcggacctttacctggtcacgaggcacgccgatgtcttcccgtacgccggcggggtgatagcaggggcagcctgctttcgcctcgacccatctcttacttgaaaggctcctcggggggcccactactgtgccccgcgggacacgccgtaggcatattcagggcgcggtgtgcacccgtggagtggctaaggcggtggactttatccccgtagagagcctagagacaaccatgaggtccccggtgttcacagacaactcctccccaccagcggtgccccagagcttccaggtggcccacctgcacctcccaccggcagcggtaagagcaccaaggtcccggccgcatacgcggctcagggctacaaggtgctggtgctcaacccctccgttgctgcaacactgggctttggcgcctacatgtccaaggcccagggattgatccgaacatcaggactggggtgaggacaattactactggcagccccatcacgtactccacctacggcaagttcctcgctgacggcgggtgctcagggggtgcttatgacataataatttgtgacgagtgccacccacggatgcaacatccatcttgggcatcggcactgtccttgaccaagcagagacagcgggggcgaggctggttgtgctcgccaccgctacccctccgggctccgtcactgtgccccactctaacatgaggaggttgctctgtccactaccggagagatccccttttacggcaaggctatcccccttgaggcaatcaagggggggagacatctcattttctgccactcaaggaaaaagtgcgacgagctcgccgcaaggctggtcgcgtgggcatcaatgctgtggcctactaccgcggccttgacgtgtccgtcatcccgaccagcggcgacgttgtcgtcgtggcaactgatgccctcatgaccggcttttccggcgacttcgactcggtgatgactgtaacacgtgtgtcacccagacagtcgacttcagccttgaccctaccttcaccattgagacaaccacgcttcctcaggacgctgtttcccgcacccaacgtcggggcaggactggcagggggaagccaggcatctatgatttgtggcaccgggagagcgcccctccggcatgttcgactcgtccgtcctctgtgagtgctatgacgcaggctgtgcttggtatgagctcacacccgccgagaccacagttaggttacgagcgtaatgaacaccccggggcttcccgtgtgccaggaccatcttgaattttgggagggcgtcttcacaggtctcacccatatagacgcccacttcttatctcagacaaagcagagtggggaaaactttccttacctggtagcgtacaagccaccgtgtgcgctagagctcaagctccccccccatcgtgggaccagatgtggaagtgcttgatccgcctcaagcccacccttcatgggccaacacctctgctatacagactgggcgctgttcaaatgaaatcaccctgacgcacccgatcaccaagtacatcatgacatgcatgtcggctgacct

SEQ ID NO: 447 - DNA, 4872 bp, Hepatitis C virus
tcgcccacaggacgtcaagttcccgggtggcggtcagatcgttggtggagtttacttgttaccgcgcaggggccctagattgggtgtgcgcgcgacgaggaagacttccgagcggtcgcaacctcgagtagacgtcagcctatccccaaggcgcgtcggcccgagggcaggacctgggctcagcccgggtatccttggcccctctatggcaatgagggctgcgggtgggcgggatggctcctgtccccccgtggtctcggcctagctggggccctacagacccccggcgtaggtcgcgcaatttgggtaaggtcatcgataccctcacgtgcggcttcgccgacctcatggggtacattccgctcgtcggcgcgcctcttggaggcgccgccaggccctggcgcatggtgtccgggttctggaggacggcgtgaactatgcaacagggaaccttcctggttgctctttctctatcttccttttggccctgctctcttgcctgactgtacccgcgtcggcctacaagttcgcaactcctcggggctttatcatgtcaccaatgattgccctaactcgagtattgtgtacgagacggccgacgccattctacactctccggggtgtgtcccttgcgtccgcgagggtaacgcctcgaagtgctggtgccggtggcccccacagtggccaccaaggacggcaaactccccacgacgcagcttcgacgtcacatcgatctgcttgtcgggagcgccaccctctgctcggccctctatgtgggggacttgtgcggtctgtcttccttgtcggtcaactgttcactttctcccccagacgccactggacaacgcaagactgcaactgttccatctaccccggccatataacgggccaccgcatggcatgggatatgatgatgaattggtctcctacacagcgctggtaatggctcaactgctcagagtcccgcaagctgtcatggacatgatcgctggagcccactggggagtcctagcgggcatagcgtatttctccatggtggggaactgggcaaaggtcttttggtgctgttgttgtttgccggcgtcgacgcgagcactcgcaccatcggggggtctgctgctgcgaccacgtccggattcgccaagctcttcgctgctggctcccgccagaatgtccagctgatcaacaccaacggaagtggcacatcaatcgcacggccttgaactgtaatgcgagtctcgacactggctgggtagcggggctcttctattaccacaaattcaactcttcgggctgccccgagaggatggccagctgtagacccctgccgatttcgaccagggctggggccctatcagctacgccaacgcaagcggcaccgaccaccccccctactgctggcactaccccccaaagccttgcggtatcgtgccggcacagaacgtatgtggcccagtatattgcttcctcccagccctgtggtggtgggaacgaccgacaagttgggcgtgcccacctacaactggggtagcaatgacacggacgtcttcgtccttaacaacaccaggccaccgttgggcaattggttcggttgacctggatggactcatatggatataccaaagtgtgcggagcgcccccttgtgtcatcggaggggtaggcaataacaccttgcactgccccactgactgtttccgcaagcatccagaagccacatactctcggtgtggctccgtccctggatcacgcccaggtgcctggtccactactcttacaggctttggcattatccttgtactgtcaactacaccctgttcaaagtcaggatgtacgtgggaggggtcgagcacaggctggaggtgcttgcaactggacgcggggcgaacgttgcgatctggacgacagggacaggtccgagctcagcccgctgctgctgtccaccacacagtggcaggttcttccgtgttctttcacgaccttgccagccttgactaccggcctctccacctccaccagaacatcgtggatgtgcaatatttgtacggggtggggtcaagcattgtgtcctgggccatcaagtgggagtacgtcatcctcttgtttctcctgcttgcagacgcgcgcatttgtcctgcttgtggatgatgctactcatatcccaggtggaggcagctttggagaacctcgtgctgctcaacgcggcgtctctgaccggggcgcacggtcttgtgtccttcctcgtgtttttctgctttgcatggtatctgaaggtaggtgggtgcccggagcggcctacgccctctacgggatgtggcctctcctcctgcttctgttggcgttgccccaacgggcatacgcactagacacggaagtggccgcgtcgtgtggtggcgttgtattgtcgggttaatggtgctgactctgtcaccgcactacaagcgctatatcagctggtgcttatggtggctccaatatttcctgactagagtggaagcgcaactgcacgtatgggtcccccccctcaacgtccgaggaggcgcgacgctgtcatcttgctcatgtgtgttatacacccggccttggtatttgacatcaccaagctgctgctggccgtcttcggacccctttggattcttcaaaccagtctgctcaaagtgccctacttgtgcgcgttcagggccttctccggctctgcgcgctagcgcgcaagatggccggaggccattacgtgcaaatggccatcatcaaggtgggggcgcttactggcacctacatctataaccatcttactcctcttcgggattggcgcacaacagcctacgagatctggccgtggctgtagagccagtcgtcttttcccagatggagactaagctcatcacctggggggcggacaccgccgcctgcggtgacatcatcaacggcttgcccgttctgcccgtaggggccgagagatactgctcggaccggccgacggagcggtctccaaggggtggaggttgctagcgcccatcacggcgtatgcccagcagacaaggggccttttgggatgtataattaccagcctgaccggcgggacaaaaaccaggtggagggtgaggttcagattgtgtctactgctgcccagactttcctggcaacctgcatcaacggggtgtgctggactgtctaccacggggccgggacaaggaccatcgcgtccccaagggtcccgttatccagatgtataccaatgtagaccaagacctcgtaggctggcccgctccctatggtgctcgctcattgacaccctgcacttgcggctcctcggacctttacctggtcacgaggcacgccgatgtcttcccgtacgccggcggggtgatagcaggggcagcctgctttcgcctcgacccatctcttacttgaaaggctcctcggggggcccactactgtgccccgcgggacacgccgtaggcatattcagggcgcggtgtgcacccgtggagtggctaaggcggtggactttatccccgtagagagcctagagacaaccatgaggtccccggtgttcacagacaactcctccccaccagcggtgccccagagcttccaggtggcccacctgcacctcccaccggcagcggtaagagcaccaaggtcccggccgcatacgcggctcagggctacaaggtgctggtgctcaacccctccgttgctgcaacactgggctttggcgcctacatgtccaaggcccagggattgatccgaacatcaggactggggtgaggacaattactactggcagccccatcacgtactccacctacggcaagttcctcgctgacggcgggtgctcagggggtgcttatgacataataatttgtgacgagtgccacccacggatgcaacatccatcttgggcatcggcactgtccttgaccaagcagagacagcgggggcgaggctggttgtgctcgccaccgctacccctccgggctccgtcactgtgccccactctaacatgaggaggttgctctgtccactaccggagagatccccttttacggcaaggctatcccccttgaggcaatcaagggggggagacatctcattttctgccactcaaggaaaaagtgcgacgagctcgccgcaaggctggtcgcgtgggcatcaatgctgtggcctactaccgcggccttgacgtgtccgtcatcccgaccagcggcgacgttgtcgtcgtggcaactgatgccctcatgaccggcttttccggcgacttcgactcggtgatgactgcaacacgtgtgtcacccagacagtcgacttcagccttgaccctaccttcaccattgagacaaccacgcttcctcaggacgctgtttcccgcacccaacgtcggggcaggactggcagggggaagccaggcatctatgatttgtggcaccgggagagcgcccctccggcatgttcgactcgtccgtcctctgtgagtgctatgacgcaggctgtgcttggtatgagctcacacccgccgagaccacagttaggttacgagcgtaatgaacaccccggggcttcccgtgtgccaggaccatcttgaattttgggagggcgtcttcacaggtctcacccatatagacgcccacttcttatctcagacaaagcagagtggggaaaactttccttacctggtagcgtacaagccaccgtgtgcgctagagctcaagctccccccccatcgtgggaccagatgtggaagtgcttgatccgcctcaagcccacccttcatgggccaacacctctgctatacagactgggcgctgttcaaatgaaatcaccctgacgcacccgatcaccaagtacatcatgacatgcatgtcggctgacct

SEQ ID NO: 448 - DNA, 4872 bp, Hepatitis C virus
tcgcccacaggacgtcaagttcccgggtggcggtcagatcgttggtggagtttacttgttaccgcgcaggggccctagattgggtgtgcgcgcgacgaggaagacttccgagcggtcgcaacctcgagtagacgtcagcctatccccaaggcgcgttggcccgagggcaggacctgggctcagcccgggtacccttggcccctctatggcaatgagggctgcgggtgggcgggatggctcctgtccccccgtggtctcggcctagctggggccctacagacccccggcgtaggtcgcgcaatttgggtaaggtcatcgataccctcacgtgcggcttcgccgacctcatggggtacattccgctcgtcggcgcgcctcttggaggcgccgccaggccctggcgcatggtgtccgggttctggaggacggcgtgaactatgcaacagggaaccttcctggttgctctttctctatcttccttttggccctgctctcttgcctgactgtacccgcgtcggcctacaagttcgcaactcctcggggctttatcatgtcaccaatgattgccctaactcgagtattgtgtacgagacggccgacgccattctacactctccggggtgtgtcccttgcgtccgcgagggtaacgcctcgaagtgctggtgccggtggcccccacagtggccaccaaggacggcaaactccccacgacgcagcttcgacgtcacatcgatctgcttgtcgggagcgccaccctctgctcggccctctatgtgggggacttgtgcggtctgtcttccttgtcggtcaactgttcactttctcccccagacgccactggacaacgcaagactgcaactgttccatctaccccggccatataacgggccaccgcatggcatgggatatgatgatgaattggtctcctacacagcgctggtaatggctcaactgctcagagtcccgcaagctgtcatggacatgatcgctggagcccactggggagtcctagcgggcatagcgtatttctccatggtggggaactgggcaaaggtcttttggtgctgttgttgtttgccggcgtcgacgcgagcactcgcaccatcggggggtctgctgctgcgaccacgtccggattcgccaagctcttcgctgctggctcccgccagaatgtccagctgatcaacaccaacggaagtggcacatcaatcgcacggccttgaactgtaatgcgagtctcgacactggctgggtagcggggctcttctattaccacaaattcaactcttcgggctgccccgagaggatggccagctgtagacccctgccgatttcgaccagggctggggccctatcagctacgccaacgcaagcggcaccgaccaccccccctactgctggcactaccccccaaagccttgcggtatcgtgccggcacagaacgtatgtggcccagtatattgcttcctcccagccctgtggtggtgggaacgaccgacaagttgggcgtgcccacctacaactggggtagcaatgacacggacgtcttcgtccttaacaacaccaggccaccgttgggcaattggttcggttgacctggatggactcatatggatataccaaagtgtgcggagcgcccccttgtgtcatcggaggggtaggcaataacaccttgcactgccccactgactgtttccgcaagcatccagaagccacatactctcggtgtggctccgtccctggatcacgcccaggtgcctggtccactactcttacaggctttggcattatccttgtactgtcaactacaccctgttcaaagtcaggatgtacgtgggaggggtcgagcacaggctggaggtgcttgcaactggacgcggggcgaacgttgcgatctggacgacagggacaggtccgagctcagcccgctgctgctgtccaccacacagtggcaggttcttccgtgttctttcacgaccttgccagccttgactaccggcctctccacctccaccagaacatcgtggatgtgcaatatttgtacggggtggggtcaagcattgtgtcctgggccatcaagtgggagtacgtcatcctcttgtttctcctgcttgcagacgcgcgcatttgtcctgcttgtggatgatgctactcatatcccaggtggaggcagctttggagaacctcgtgctgctcaacgcggcgtctctgaccggggcgcacggtcttgtgtccttcctcgtgtttttctgctttgcatggtatctgaaggtaggtgggtgcccggagcggcctacgccctctacgggatgtggcctctcctcctgcttctgttggcgttgccccaacgggcatacgcactagacacggaagtggccgcgtcgtgtggtggcgttgtattgtcgggttaatggtgctgactctgtcaccgcactacaagcgctatatcagctggtgcttatggtggctccaatattccctgactagagtggaagcgcaactgcacgtatgggtcccccccctcaacgtccgaggaggcgcgacgctgtcatcttgctcatgtgtgttatacacccggccttggtatttgacatcaccaagctgctgctggccgtcttcggacccctttggattcttcaaaccagtctgctcaaagtgccctacttgtgcgcgttcagggccttctccggctctgcgcgctagcgcgcaagatggccggaggccattacgtgcaaatggccatcatcaaggtgggggcgcttactggcacctacatctataaccatcttactcctcttcgggattggcgcacaacagcctacgagatctggccgtggctgtagagccagtcgtcttttcccagatggagactaagctcatcacctggggggcggacaccgccgcctgcggtgacatcatcaacggcttgcccgttctgcccgtaggggccgagagatactgctcggaccggccgacggagcggtctccaaggggtggaggttgctagcgcccatcacggcgtatgcccagcagacaaggggccttttgggatgtataattaccagcctgaccggcgggacaaaaaccaggtggagggtgaggttcagattgtgtctactgctgcccagactttcctggcaacctgcatcaacggggtgtgctggactgtctaccacggggccgggacaaggaccatcgcgtccccaagggtcccgttatccagatgtataccaatgtagaccaagacctcgtaggctggcccgctccctatggtgctcgctcattgacaccctgcacttgcggctcctcggacctttacctggtcacgaggcacgccgatgtcttcccgtacgccggcggggtgatagcaggggcagcctgctttcgcctcgacccatctcttacttgaaaggctcctcggggggcccactactgtgccccgcgggacacgccgtaggcatattcagggcgcggtgtgcacccgtggagtggctaaggcggtggactttatccccgtagagagcctagagacaaccatgaggtccccggtgttcacagacaactcctccccaccagcggtgccccagagcttccaggtggcccacctgcacctcccaccggcagcggtaagagcaccaaggtcccggccgcatacgcggctcagggctacaaggtgctggtgctcaacccctccgttgctgcaacactgggctttggcgcctacatgtccaaggcccagggattgatccgaacatcaggactggggtgaggacaattactactggcagccccatcacgtactccacctacggcaagttcctcgctgacggcgggtgctcagggggtgcttatgacataataatttgtgacgagtgccacccacggatgcaacatccatcttgggcatcggcactgtccttgaccaagcagagacagcgggggcgaggctggttgtgctcgccaccgctacccctccgggctccgtcactgtgccccactctaacatgaggaggttgctctgtccactaccggagagatccccttttacggcaaggctatcccccttgaggcaatcaagggggggagacatctcattttctgccactcaaggaaaaagtgcgacgagctcgccgcaaggctggtcgcgtgggcatcaatgctgtggcctactaccgcggccttgacgtgtccgtcatcccgaccagcggcgacgttgtcgtcgtggcaactgatgccctcatgaccggcttttccggcgacttcgactcggtgatgactgcaacacgtgtgtcacccagacagtcgacttcagccttgaccctaccttcaccattgagacaaccacgcttcctcaggacgctgtttcccgcacccaacgtcggggcaggactggcagggggaagccaggcatctatgatttgtggcaccgggagagcgcccctccggcatgttcgactcgtccgtcctctgtgagtgctatgacgcaggctgtgcttggtatgagctcacacccgccgagaccacagttaggttacgagcgtaatgaacaccccggggcttcccgtgtgccaggaccatcttgaattttgggagggcgtcttcacaggtctcacccatatagacgcccacttcttatctcagacaaagcagagtggggaaaactttccttacctggtagcgtacaagccaccgtgtgcgctagagctcaagctccccccccatcgtgggaccagatgtggaagtgcttgatccgcctcaagcccacccttcatgggccaacacctctgctatacagactgggcgctgttcaaatgaaatcaccctgacgcacccgatcaccaagtacatcatgacatgcatgtcggctgacct

SEQ ID NO: 449 - DNA, 4872 bp, Hepatitis C virus
tcgcccacaggacgtcaagttcccgggtggcggtcagatcgttggtggagtttacttgttaccgcgcaggggccctagattgggtgtgcgcgcgacgaggaagacttccgagcggtcgcaacctcgagtagacgtcagcctatccccaaggcgcgtcggcccgagggcaggacctgggctcagcccgggtacccttggcccctctatggcaatgagggctgcgggtgggcgggatggctcctgtccccccgtggtctcggcctagctggggccctacagacccccggcgtaggtcgcgcaatttgggtaaggtcatcgataccctcacgtgcggcttcgccgacctcatggggtacattccgctcgtcggcgcgcctcttggaggcgccgccaggccctggcgcatggtgtccgggttctggaggacggcgtgaactatgcaacagggaaccttcctggttgctctttctctatcttccttttggccctgctctcttgcctgactgtacccgcgtcggcctacaagttcgcaactcctcggggctttatcatgtcaccaatgattgccctaactcgagtattgtgtacgagacggccgacgccattctacactctccggggtgtgtcccttgcgtccgcgagggtaacgcctcgaagtgctggtgccggtggcccccacagtggccaccaaggacggcaaactccccacgacgcagcttcgacgtcacatcgatctgcttgtcgggagcgccaccctctgctcggccctctatgtgggggacttgtgcggtctgtcttccttgtcggtcaactgttcactttctcccccagacgccactggacaacgcaagactgcaactgttccatctaccccggccatataacgggccaccgcatggcatgggatatgatgatgaattggtctcctacacagcgctggtaatggctcaactgctcagagtcccgcaagctgtcatggacatgatcgctggagcccactggggagtcctagcgggcatagcgtatttctccatggtggggaactgggcaaaggtcttttggtgctgttgttgtttgccggcgtcgacgcgagcactcgcaccatcggggggtctgctgctgcgaccacgtccggattcgccaagctcttcgctgctggctcccgccagaatgtccagctgatcaacaccaacggaagtggcacatcaatcgcacggccttgaactgtaatgcgagtctcgacactggctgggtagcggggctcttctattaccacaaattcaactcttcgggctgccccgagaggatggccagctgtagacccctgccgatttcgaccagggctggggccctatcagctacgccaacgcaagcggcaccgaccaccccccctactgctggcactaccccccaaagccttgcggtatcgtgccggcacagaacgtatgtggcccagtatattgcttcctcccagccctgtggtggtgggaacgaccgacaagttgggcgtgcccacctacaactggggtagcaatgacacggacgtcttcgtccttaacaacaccaggccaccgttgggcaattggttcggttgacctggatggactcatatggatataccaaagtgtgcggagcgcccccttgtgtcatcggaggggtaggcaataacaccttgcactgccccactgactgtttccgcaagcatccagaagccacatactctcggtgtggctccgtccctggatcacgcccaggtgcctggtccactactcttacaggctttggcattatccttgtactgtcaactacaccctgttcaaagtcaggatgtacgtgggaggggtcgagcacaggctggaggtgcttgcaactggacgcggggcgaacgttgcgatctggacgacagggacaggtccgagctcagcccgctgctgctgtccaccacacagtggcaggttcttccgtgttctttcacgaccttgccagccttgactaccggcctctccacctccaccagaacatcgtggatgtgcaatatttgtacggggtggggtcaagcattgtgtcctgggccatcaagtgggagtacgtcatcctcttgtttctcctgcttgcagacgcgcgcatttgtcctgcttgtggatgatgctactcatatcccaggtggaggcagctttggagaacctcgtgctgctcaacgcggcgtctctgaccggggcgcacggtcttgtgtccttcctcgtgtttttctgctttgcatggtatctgaaggtaggtgggtgcccggagcggcctacgccctctacgggatgtggcctctcctcctgcttctgttggcgttgccccaacgggcatacgcactagacacggaagtggccgcgtcgtgtggtggcgttgtattgtcgggttaatggtgctgactctgtcaccgcactacaagcgctatatcagctggtgcttatggtggctccaatatttcctgactagagtggaagcgcaactgcacgtatgggtcccccccctcaacgtccgaggaggcgcgacgctgtcatcttgctcatgtgtgttatacacccggccttggtatttgacatcaccaagctgctgctggccgtcttcggacccctttggattcttcaaaccagtctgctcaaagtgccctacttgtgcgcgttcagggccttctccggctctgcgcgctagcgcgcaagatggccggaggccattacgtgcaaatggccatcatcaaggtgggggcgcttactggcacctacatctataaccatcttactcctcttcgggattggcgcacaacagcctacgagatctggccgtggctgtagagccagtcgtcttttcccagatggagactaagctcatcacctggggggcggacaccgccgcctgcggtgacatcatcaacggcttgcccgttctgcccgtaggggccgagagatactgctcggaccggccgacggagcggtctccaaggggtggaggttgctagcgcccatcacggcgtatgcccagcagacaaggggccttttgggatgtataattaccagcctgaccggcgggacaaaaaccaggtggagggtgaggttcagattgtgtctactgctgcccagactttcctggcaacctgcatcaacggggtgtgctggactgtctaccacggggccgggacaaggaccatcgcgtccccaagggtcccgttatccagatgtataccaatgtagaccaagacctcgtaggctggcccgctccctatggtgctcgctcattgacaccctgcacttgcggctcctcggacctttacctggtcacgaggcacgccgatgtcttcccgtacgccggcggggtgatagcaggggcagcctgctttcgcctcgacccatctcttacttgaaaggctcctcggggggcccactactgtgccccgcgggacacgccgtaggcatattcagggcgcggtgtgcacccgtggagtggctaaggcggtggactttatccccgtagagagcctagagacaaccatgaggtccccggtgttcacagacaactcctccccaccagcggtgccccagagcttccaggtggcccacctgcacctcccaccggcagcggtaagagcaccaaggtcccggccgcatacgcggctcagggctacaaggtgctggtgctcaacccctccgttgctgcaacactgggctttggcgcctacatgtccaaggcccagggattgatccgaacatcaggactggggtgaggacaattactactggcagccccatcacgtactccacctacggcaagttcctcgctgacggcgggtgctcagggggtgcttatgacataataatttgtgacgagtgccacccacggatgcaacatccatcttgggcatcggcactgtccttgatcaagcagagacagcgggggcgaggctggttgtgctcgccaccgctacccctccgggctccgtcactgtgccccactctaacatgaggaggttgctctgtccactaccggagagatccccttttacggcaaggctatcccccttgaggcaatcaagggggggagacatctcattttctgccactcaaggaaaaagtgcgacgagctcgccgcaaggctggtcgcgtgggcatcaatgctgtggcctactaccgcggccttgacgtgtccgtcatcccgaccagcggcgacgttgtcgtcgtggcaactgatgccctcatgaccggcttttccggcgacttcgactcggtgatgactgcaacacgtgtgtcacccagacagtcgacttcagccttgaccctaccttcaccattgagacaaccacgcttcctcaggacgctgtttcccgcacccaacgtcggggcaggactggcagggggaagccaggcatctatgatttgtggcaccgggagagcgcccctccggcatgttcgactcgtccgtcctctgtgagtgctatgacgcaggctgtgcttggtatgagctcacacccgccgagaccacagttaggttacgagcgtaatgaacaccccggggcttcccgtgtgccaggaccatcttgaattttgggagggcgtcttcacaggtctcacccatatagacgcccacttcttatctcagacaaagcagagtggggaaaactttccttacctggtagcgtacaagccaccgtgtgcgctagagctcaagctccccccccatcgtgggaccagatgtggaagtgcttgatccgcctcaagcccacccttcatgggccaacacctctgctatacagactgggcgctgttcaaatgaaatcaccctgacgcacccgatcaccaagtacatcatgacatgcatgtcggctgacct

SEQ ID NO: 450 - DNA, 4872 bp, Hepatitis C virus
tcgcccacaggacgtcaagttcccgggtggcggtcagatcgttggtggagtttacttgttaccgcgcaggggccctagattgggtgtgcgcgcgacgaggaagacttccgagcggtcgcaacctcgagtagacgtcagcctatccccaaggcgcgtcggcccgagggcaggacctgggctcagcccgggtacccttggcccctctatggcaatgagggctgcgggtgggcgggatggctcctgtccccccgtggtctcggcctagctggggccctacagacccccggcgtaggtcgcgcaatttgggtaaggtcatcgataccctcacgtgcggcttcgccgacctcatggggtacattccgctcgtcggcgcgcctcttggaggcgccgccaggccctggcgcatggtgtccgggttctggaggacggcgtgaactatgcaacagggaaccttcctggttgctctttctctatcttccttttggccctgctctcttgcctgactgtacccgcgtcggcctacaagttcgcaactcctcggggctttatcatgtcaccaatgattgccctaactcgagtattgtgtacgagacggccgacgccattctacactctccggggtgtgtcccttgcgtccgcgagggtaacgcctcgaagtgctggtgccggtggcccccacagtggccaccaaggacggcaaactccccacgacgcagcttcgacgtcacatcgatctgcttgtcgggagcgccaccctctgctcggccctctatgtgggggacttgtgcggtctgtcttccttgtcggtcaactgttcactttctcccccagacgccactggacaacgcaagactgcaactgttccatctaccccggccatataacgggccaccgcatggcatgggatatgatgatgaattggtctcctacacagcgctggtaatggctcaactgctcagagtcccgcaagctgtcatggacatgatcgctggagcccactggggagtcctagcgggcatagcgtatttctccatggtggggaactgggcaaaggtcttttggtgctgttgttgtttgccggcgtcgacgcgagcactcgcaccatcggggggtctgctgctgcgaccacgtccggattcgccaagctcttcgctgctggctcccgccagaatgtccagctgatcaacaccaacggaagtggcacatcaatcgcacggccttgaactgtaatgcgagtctcgacactggctgggtagcggggctcttctattaccacaaattcaactcttcgggctgccccgagaggatggccagctgtagacccctgccgatttcgaccagggctggggccctatcagctacgccaacgcaagcggcaccgaccaccccccctactgctggcactaccccccaaagccttgcggtatcgtgccggcacagaacgtatgtggcccagtatattgcttcctcccagccctgtggtggtgggaacgaccgacaagttgggcgtgcccacctacaactggggtagcaatgacacggacgtcttcgtccttaacaacaccaggccaccgttgggcaattggttcggttgacctggatggactcatatggatataccaaagtgtgcggagcgccctcttgtgtcatcggaggggtaggcaataacaccttgcactgccccactgactgtttccgcaagcatccagaagccacatactctcggtgtggctccgtccctggatcacgcccaggtgcctggtccactactcttacaggctttggcattatccttgtactgtcaactacaccctgttcaaagtcaggatgtacgtgggaggggtcgagcacaggctggaggtgcttgcaactggacgcggggcgaacgttgcgatctggacgacagggacaggtccgagctcagcccgctgctgctgtccaccacacagtggcaggttcttccgtgttctttcacgaccttgccagccttgactaccggcctctccacctccaccagaacatcgtggatgtgcaatatttgtacggggtggggtcaagcattgtgtcctgggccatcaagtgggagtacgtcatcctcttgtttctcctgcttgcagacgcgcgcatttgtcctgcttgtggatgatgctactcatatcccaggtggaggcagctttggagaacctcgtgctgctcaacgcggcgtctctgaccggggcgcacggtcttgtgtccttcctcgtgtttttctgctttgcatggtatctgaaggtaggtgggtgcccggagcggcctacgccctctacgggatgtggcctctcctcctgcttctgttggcgttgccccaacgggcatacgcactagacacggaagtggccgcgtcgtgtggtggcgttgtattgtcgggttaatggtgctgactctgtcaccgcactacaagcgctatatcagctggtgcttatggtggctccaatatttcctgactagagtggaagcgcaactgcacgtatgggtcccccccctcaacgtccgaggaggcgcgacgctgtcatcttgctcatgtgtgttatacacccggccttggtatttgacatcaccaagctgctgctggccgtcttcggacccctttggattcttcaaaccagtctgctcaaagtgccctacttgtgcgcgttcagggccttctccggctctgcgcgctagcgcgcaagatggccggaggccattacgtgcaaatggccatcatcaaggtgggggcgcttactggcacctacatctataaccatcttactcctcttcgggattggcgcacaacagcctacgagatctggccgtggctgtagagccagtcgtcttttcccagatggagactaagctcatcacctggggggcggacaccgccgcctgcggtgacatcatcaacggcttgcccgttctgcccgtaggggccgagagatactgctcggaccggccgacggagcggtctccaaggggtggaggttgctagcgcccatcacggcgtatgcccagcagacaaggggccttttgggatgtataattaccagcctgaccggcgggacaaaaaccaggtggagggtgaggttcagattgtgtctactgctgcccagactttcctggcaacctgcatcaacggggtgtgctggactgtctaccacggggccgggacaaggaccatcgcgtccccaagggtcccgttatccagatgtataccaatgtagaccaagacctcgtaggctggcccgctccctatggtgctcgctcattgacaccctgcacttgcggctcctcggacctttacctggtcacgaggcacgccgatgtcttcccgtacgccggcggggtgatagcaggggcagcctgctttcgcctcgacccatctcttacttgaaaggctcctcggggggcccactactgtgccccgcgggacacgccgtaggcatattcagggcgcggtgtgcacccgtggagtggctaaggcggtggactttatccccgtagagagcctagagacaaccatgaggtccccggtgttcacagacaactcctccccaccagcggtgccccagagcttccaggtggcccacctgcacctcccaccggcagcggtaagagcaccaaggtcccggccgcatacgcggctcagggctacaaggtgctggtgctcaacccctccgttgctgcaacactgggctttggcgcctacatgtccaaggcccagggattgatccgaacatcaggactggggtgaggacaattactactggcagccccatcacgtactccacctacggcaagttcctcgctgacggcgggtgctcagggggtgcttatgacataataatttgtgacgagtgccacccacggatgcaacatccatcttgggcatcggcactgtccttgaccaagcagagacagcgggggcgaggctggttgtgctcgccaccgctacccctccgggctccgtcactgtgccccactctaacatgaggaggttgctctgtccactaccggagagatccccttttacggcaaggctatcccccttgaggcaatcaagggggggagacatctcattttctgccactcaaggaaaaagtgcgacgagctcgccgcaaggctggtcgcgtgggcatcaatgctgtggcctactaccgcggccttgacgtgtccgtcatcccgaccagcggcgacgttgtcgtcgtggcaactgatgccctcatgaccggcttttccggcgacttcgactcggtgatgactgcaacacgtgtgtcacccagacagtcgacttcagccttgaccctaccttcaccattgagacaaccacgcttcctcaggacgctgtttcccgcacccaacgtcggggcaggactggcagggggaagccaggcatctatgatttgtggcaccgggagagcgcccctccggcatgttcgactcgtccgtcctctgtgagtgctatgacgcaggctgtgcttggtatgagctcacacccgccgagaccacagttaggttacgagcgtaatgaacaccccggggcttcccgtgtgccaggaccatcttgaattttgggagggcgtcttcacaggtctcacccatatagacgcccacttcttatctcagacaaagcagagtggggaaaactttccttacctggtagcgtacaagccaccgtgtgcgctagagctcaagctccccccccatcgtgggaccagatgtggaagtgcttgatccgcctcaagcccacccttcatgggccaacacctctgctatacagactgggcgctgttcaaatgaaatcaccctgacgcacccgatcaccaagtacatcatgacatgcatgtcggctgacct

SEQ ID NO: 451 - DNA, 4872 bp, Hepatitis C virus
tcgcccacaggacgtcaagttcccgggtggcggtcagatcgttggtggagtttacttgttaccgcgcaggggccctagattgggtgtgcgcgcgacgaggaagacttccgagcggtcgcaacctcgagtagacgtcagcctatccccaaggcgcgtcggcccgagggcaggacctgggctcagcccgggtacccttggcccctctatggcaatgagggctgcgggtgggcgggatggctcctgtccccccgtggtctcggcctagctggggccctacagacccccggcgtaggtcgcgcaatttgggtaaggtcatcgataccctcacgtgcggcttcgccgacctcatggggtacattccgctcgtcggcgcgcctcttggaggcgccgccaggccctggcgcatggtgtccgggttctggaggacggcgtgaactatgcaacagggaaccttcctggttgctctttctctatcttccttttggccctgctctcttgcctgactgtacccgcgtcggcctacaagttcgcaactcctcggggctttatcatgtcaccaatgattgccctaactcgagtattgtgtacgagacggccgacgccattctacactctccggggtgtgtcccttgcgtccgcgagggtaacgcctcgaagtgctggtgccggtggcccccacagtggccaccaaggacggcaaactccccacgacgcagcttcgacgtcacatcgatctgcttgtcgggagcgccaccctctgctcggccctctatgtgggggacttgtgcggtctgtcttccttgtcggtcaactgttcactttctcccccagacgccactggacaacgcaagactgcaactgttccatctaccccggccatataacgggccaccgcatggcatgggatatgatgatgaattggtctcctacacagcgctggtaatggctcaactgctcagagtcccgcaagctgtcatggacatgatcgctggagcccactggggagtcctagcgggcatagcgtatttctccatggtggggaactgggcaaaggtcttttggtgctgttgttgtttgccggcgtcgacgcgagcactcgcaccatcggggggtctgctgctgcgaccacgtccggattcgccaagctcttcgctgctggctcccgccagaatgtccagctgatcaacaccaacggaagtggcacatcaatcgcacggccttgaactgtaatgcgagtctcgacactggctgggtagcggggctcttctattaccacaaattcaactcttcgggctgccccgagaggatggccagctgtagacccctgccgatttcgaccagggctggggccctatcagctacgccaacgcaagcggcaccgaccaccccccctactgctggcactaccccccaaagccttgcggtatcgtgccggcacagaacgtatgtggcccagtatattgcttcctcccagccctgtggtggtgggaacgaccgacaagttgggcgtgcccacctacaactggggtagcaatgacacggacgtcttcgtccttaacaacaccaggccaccgttgggcaattggttcggttgacctggatggactcatatggatataccaaagtgtgcggagcgcccccttgtgtcatcggaggggtaggcaataacaccttgcactgccccactgactgtttccgcaagcatccagaagccacatactctcggtgtggctccgtccctggatcacgcccaggtgcctggtccactactcttacaggctttggcattatccttgtactgtcaactacaccctgttcaaagtcaggatgtacgtgggaggggtcgagcacaggctggaggtgcttgcaactggacgcggggcgaacgttgcgatctggacgacaggggcaggtccgagctcagcccgctgctgctgtccaccacacagtggcaggttcttccgtgttctttcacgaccttgccagccttgactaccggcctctccacctccaccagaacatcgtggatgtgcaatatttgtacggggtggggtcaagcattgtgtcctgggccatcaagtgggagtacgtcatcctcttgtttctcctgcttgcagacgcgcgcatttgtcctgcttgtggatgatgctactcatatcccaggtggaggcagctttggagaacctcgtgctgctcaacgcggcgtctctgaccggggcgcacggtcttgtgtccttcctcgtgtttttctgctttgcatggtatctgaaggtaggtgggtgcccggagcggcctacgccctctacgggatgtggcctctcctcctgcttctgttggcgttgccccaacgggcatacgcactagacacggaagtggccgcgtcgtgtggtggcgttgtattgtcgggttaatggtgctgactctgtcaccgcactacaagcgctatatcagctggtgcttatggtggctccaatatttcctgactagagtggaagcgcaactgcacgtatgggtcccccccctcaacgtccgaggaggcgcgacgctgtcatcttgctcatgtgtgttatacacccggccttggtatttgacatcaccaagctgctgctggccgtcttcggacccctttggattcttcaaaccagtctgctcaaagtgccctacttgtgcgcgttcagggccttctccggctctgcgcgctagcgcgcaagatggccggaggccattacgtgcaaatggccatcatcaaggtgggggcgcttactggcacctacatctataaccatcttactcctcttcgggattggcgcacaacagcctacgagatctggccgtggctgtagagccagtcgtcttttcccagatggagactaagctcatcacctggggggcggacaccgccgcctgcggtgacatcatcaacggcttgcccgttctgcccgtaggggccgagagatactgctcggaccggccgacggagcggtctccaaggggtggaggttgctagcgcccatcacggcgtatgcccagcagacaaggggccttttgggatgtataattaccagcctgaccggcgggacaaaaaccaggtggagggtgaggttcagattgtgtctactgctgcccagactttcctggcaacctgcatcaacggggtgtgctggactgtctaccacggggccgggacaaggaccatcgcgtccccaagggtcccgttatccagatgtataccaatgtagaccaagacctcgtaggctggcccgctccctatggtgctcgctcattgacaccctgcacttgcggctcctcggacctttacctggtcacgaggcacgccgatgtcttcccgtacgccggcggggtgatagcaggggcagcctgctttcgcctcgacccatctcttacttgaaaggctcctcggggggcccactactgtgccccgcgggacacgccgtaggcatattcagggcgcggtgtgcacccgtggagtggctaaggcggtggactttatccccgtagagagcctagagacaaccatgaggtccccggtgttcacagacaactcctccccaccagcggtgccccagagcttccaggtggcccacctgcacctcccaccggcagcggtaagagcaccaaggtcccggccgcatacgcggctcagggctacaaggtgctggtgctcaacccctccgttgctgcaacactgggctttggcgcctacatgtccaaggcccagggattgatccgaacatcaggactggggtgaggacaattactactggcagccccatcacgtactccacctacggcaagttcctcgctgacggcgggtgctcagggggtgcttatgacataataatttgtgacgagtgccacccacggatgcaacatccatcttgggcatcggcactgtccttgaccaagcagagacagcgggggcgaggctggttgtgctcgccaccgctacccctccgggctccgtcactgtgccccactctaacatgaggaggttgctctgtccactaccggagagatccccttttacggcaaggctatcccccttgaggcaatcaagggggggagacatctcattttctgccactcaaggaaaaagtgcgacgagctcgccgcaaggctggtcgcgtgggcatcaatgctgtggcctactaccgcggccttgacgtgtccgtcatcccgaccagcggcgacgttgtcgtcgtggcaactgatgccctcatgaccggcttttccggcgacttcgactcggtgatgactgcaacacgtgtgtcacccagacagtcgacttcagccttgaccctaccttcaccattgagacaaccacgcttcctcaggacgctgtttcccgcacccaacgtcggggcaggactggcagggggaagccaggcatctatgatttgtggcaccgggagagcgcccctccggcatgttcgactcgtccgtcctctgtgagtgctatgacgcaggctgtgcttggtatgagctcacacccgccgagaccacagttaggttacgagcgtaatgaacaccccggggcttcccgtgtgccaggaccatcttgaattttgggagggcgtcttcacaggtctcacccatatagacgcccacttcttatctcagacaaagcagagtggggaaaactttccttacctggtagcgtacaagccaccgtgtgcgctagagctcaagctccccccccatcgtgggaccagatgtggaagtgcttgatccgcctcaagcccacccttcatgggccaacacctctgctatacagactgggcgctgttcaaatgaaatcaccctgacgcacccgatcaccaagtacatcatgacatgcatgtcggctgacct

SEQ ID NO: 452 - DNA, 4872 bp, Hepatitis C virus
tcgcccacaggacgtcaagttcccgggtggcggtcagatcgttggtggagtttacttgttaccgcgcaggggccctagattgggtgtgcgcgcgacgaggaagacttccgagcggtcgcaacctcgagtagacgtcagcctatccccaaggcgcgtcggcccgagggcaggacctgggctcagcccgggtacccttggcccctctatggcaatgagggctgcgggtgggcgggatggctcctgtccccccgtggtctcggcctagctggggccctacagacccccggcgtaggtcgcgcaatttgggtaaggtcatcgataccctcacgtgcggcttcgccgacctcatggggtacattccgctcgtcggcgcgcctcttggaggcgccgccaggccctggcgcatggtgtccgggttctggaggacggcgtgaactatgcaacagggaaccttcctggttgctctttctctatcttccttttggccctgctctcttgcctgactgtacccgcgtcggcctacaagttcgcaactcctcggggctttatcatgtcaccaatgattgccctaactcgagtattgtgtacgagacggccgacgccattctacactctccggggtgtgtcccttgcgtccgcgagggtaacgcctcgaagtgctggtgccggtggcccccacagtagccaccaaggacggcaaactccccacgacgcagcttcgacgtcacatcgatctgcttgtcgggagcgccaccctctgctcggccctctatgtgggggacttgtgcggtctgtcttccttgtcggtcaactgttcactttctcccccagacgccactggacaacgcaagactgcaactgttccatctaccccggccatataacgggccaccgcatggcatgggatatgatgatgaattggtctcctacacagcgctggtaatggctcaactgctcagagtcccgcaagctgtcatggacatgatcgctggagcccactggggagtcctagcgggcatagcgtatttctccatggtggggaactgggcaaaggtcttttggtgctgttgttgtttgccggcgtcgacgcgagcactcgcaccatcggggggtctgctgctgcgaccacgtccggattcgccaagctcttcgctgctggctcccgccagaatgtccagctgatcaacaccaacggaagtggcacatcaatcgcacggccttgaactgtaatgcgagtctcgacactggctgggtagcggggctcttctattaccacaaattcaactcttcgggctgccccgagaggatggccagctgtagacccctgccgatttcgaccagggctggggccctatcagctacgccaacgcaagcggcaccgaccaccccccctactgctggcactaccccccaaagccttgcggtatcgtgccggcacagaacgtatgtggcccagtatattgcttcctcccagccctgtggtggtgggaacgaccgacaagttgggcgtgcccacctacaactggggtagcaatgacacggacgtcttcgtccttaacaacaccaggccaccgttgggcaattggttcggttgacctggatggactcatatggatataccaaagtgtgcggagcgcccccttgtgtcatcggaggggtaggcaataacaccttgcactgccccactgactgtttccgcaagcatccagaagccacatactctcggtgtggctccgtccctggatcacgcccaggtgcctggtccactactcttacaggctttggcattatccttgtactgtcaactacaccctgttcaaagtcaggatgtacgtgggaggggtcgagcacaggctggaggtgcttgcaactggacgcggggcgaacgttgcgatctggacgacagggacaggtccgagctcagcccgctgctgctgtccaccacacagtggcaggttcttccgtgttctttcacgaccttgccagccttgactaccggcctctccacctccaccagaacatcgtggatgtgcaatatttgtacggggtggggtcaagcattgtgtcctgggccatcaagtgggagtacgtcatcctcttgtttctcctgcttgcagacgcgcgcatttgtcctgcttgtggatgatgctactcatatcccaggtggaggcagctttggagaacctcgtgctgctcaacgcggcgtctctgaccggggcgcacggtcttgtgtccttcctcgtgtttttctgctttgcatggtatctgaaggtaggtgggtgcccggagcggcctacgccctctacgggatgtggcctctcctcctgcttctgttggcgttgccccaacgggcatacgcactagacacggaagtggccgcgtcgtgtggtggcgttgtattgtcgggttaatggtgctgactctgtcaccgcactacaagcgctatatcagctggtgcttatggtggctccaatatttcctgactagagtggaagcgcaactgcacgtatgggtcccccccctcaacgtccgaggaggcgcgacgctgtcatcttgctcatgtgtgttatacacccggccttggtatttgacatcaccaagctgctgctggccgtcttcggacccctttggattcttcaaaccagtctgctcaaagtgccctacttgtgcgcgttcagggccttctccggctctgcgcgctagcgcgcaagatggccggaggccattacgtgcaaatggccatcatcaaggtgggggcgcttactggcacctacatctataaccatcttactcctcttcgggattggcgcacaacagcctacgagatctggccgtggctgtagagccagtcgtcttttcccagatggagactaagctcatcacctggggggcggacaccgccgcctgcggtgacatcatcaacggcttgcccgttctgcccgtaggggccgagagatactgctcggaccggccgacggagcggtctccaaggggtggaggttgctagcgcccatcacggcgtatgcccagcagacaaggggccttttgggatgtataattaccagcctgaccggcgggacaaaaaccaggtggagggtgaggttcagattgtgtctactgctgcccagactttcctggcaacctgcatcaacggggtgtgctggactgtctaccacggggccgggacaaggaccatcgcgtccccaagggtcccgttatccagatgtataccaatgtagaccaagacctcgtaggctggcccgctccctatggtgctcgctcattgacaccctgcacttgcggctcctcggacctttacctggtcacgaggcacgccgatgtcttcccgtacgccggcggggtgatagcaggggcagcctgctttcgcctcgacccatctcttacttgaaaggctcctcggggggcccactactgtgccccgcgggacacgccgtaggcatattcagggcgcggtgtgcacccgtggagtggctaaggcggtggactttatccccgtagagagcctagagacaaccatgaggtccccggtgttcacagacaactcctccccaccagcggtgccccagagcttccaggtggcccacctgcacctcccaccggcagcggtaagagcaccaaggtcccggccgcatacgcggctcagggctacaaggtgctggtgctcaacccctccgttgctgcaacactgggctttggcgcctacatgtccaaggcccagggattgatccgaacatcaggactggggtgaggacaattactactggcagccccatcacgtactccacctacggcaagttcctcgctgacggcgggtgctcagggggtgcttatgacataataatttgtgacgagtgccacccacggatgcaacatccatcttgggcatcggcactgtccttgaccaagcagagacagcgggggcgaggctggttgtgctcgccaccgctacccctccgggctccgtcactgtgccccactctaacatgaggaggttgctctgtccactaccggagagatccccttttacggcaaggctatcccccttgaggcaatcaagggggggagacatctcattttctgccactcaaggaaaaagtgcgacgagctcgccgcaaggctggtcgcgtgggcatcaatgctgtggcctactaccgcggccttgacgtgtccgtcatcccgaccagcggcgacgttgtcgtcgtggcaactgatgccctcatgaccggcttttccggcgacttcgactcggtgatgactgcaacacgtgtgtcacccagacagtcgacttcagccttgaccctaccttcaccattgagacaaccacgcttcctcaggacgctgtttcccgcacccaacgtcggggcaggactggcagggggaagccaggcatctatgatttgtggcaccgggagagcgcccctccggcatgttcgactcgtccgtcctctgtgagtgctatgacgcaggctgtgcttggtatgagctcacacccgccgagaccacagttaggttacgagcgtaatgaacaccccggggcttcccgtgtgccaggaccatcttgaattttgggagggcgtcttcacaggtctcacccatatagacgcccacttcttatctcagacaaagcagagtggggaaaactttccttacctggtagcgtacaagccaccgtgtgcgctagagctcaagctccccccccatcgtgggaccagatgtggaagtgcttgatccgcctcaagcccacccttcatgggccaacacctctgctatacagactgggcgctgttcaaatgaaatcaccctgacgcacccgatcaccaagtacatcatgacatgcatgtcggctgacct

SEQ ID NO: 453 - DNA, 4872 bp, Hepatitis C virus
tcgcccacaggacgtcaagttcccgggtggcggtcagatcgttggtggagtttacttgttaccgcgcaggggccctagattgggtgtgcgcgcgacgaggaagacttccgagcggtcgcaacctcgagtagacgtcagcctatccccaaggcgcgtcggcccgagggcaggacctgggctcagcccgggtacccttggcccctctatggcaatgagggctgcgggtgggcgggatggctcctgtccccccgtggtctcggcctagctggggccctacagacccccggcgtaggtcgcgcaatttgggtaaggtcatcgataccctcacgtgcggcttcgccgacctcatggggtacattccgctcgtcggcgcgcctcttggaggcgccgccaggccctggcgcatggtgtccgggttctggaggacggcgtgaactatgcaacagggaaccttcctggttgctctttctctatcttccttttggccctgctctcttgcctgactgtacccgcgtcggcctacaagttcgcaactcctcggggctttatcatgtcaccaatgattgccctaactcgagtattgtgtacgagacggccgacgccattctacactctccggggtgtgtcccttgcgtccgcgagggtaacgcctcgaagtgctggtgccggtggcccccacagtggccaccaaggacggcaaactccccacgacgcagcttcgacgtcacatcgatctgcttgtcgggagcgccaccctctgctcggccctctatgtgggggacttgtgcggtctgtcttccttgtcggtcaactgttcactttctcccccagacgccactggacaacgcaagactgcaactgttccatctaccccggccatataacgggccaccgcatggcatgggatatgatgatgaattggtctcctacacagcgctggtaatggctcaactgctcagagtcccgcaagctgtcatggacatgatcgctggagcccactggggagtcctagcgggcatagcgtatttctccatggtggggaactgggcaaaggtcttttggtgctgttgttgtttgccggcgtcgacgcgagcactcgcaccatcggggggtctgctgctgcgaccacgtccggattcgccaagctcttcgctgctggctcccgccagtatgtccagctgatcaacaccaacggaagtggcacatcaatcgcacggccttgaactgtaatgcgagtctcgacactggctgggtagcggggctcttctattaccacaaattcaactcttcgggctgccccgagaggatggccagctgtagacccctgccgatttcgaccagggctggggccctatcagctacgccaacgcaagcggcaccgaccaccccccctactgctggcactaccccccaaagccttgcggtatcgtgccggcacagaacgtatgtggcccagtatattgcttcctcccagccctgtggtggtgggaacgaccgacaagttgggcgtgcccacctacaactggggtagcaatgacacggacgtcttcgtccttaacaacaccaggccaccgttgggcaattggttcggttgacctggatggactcatatggatataccaaagtgtgcggagcgcccccttgtgtcatcggaggggtaggcaataacaccttgcactgccccactgactgtttccgcaagcatccagaagccacatactctcggtgtggctccgtccctggatcacgcccaggtgcctggtccactactcttacaggctttggcattatccttgtactgtcaactacaccctgttcaaagtcaggatgtacgtgggaggggtcgagcacaggctggaggtgcttgcaactggacgcggggcgaacgttgcgatctggacgacagggacaggtccgagctcagcccgctgctgctgtccaccacacagtggcaggttcttccgtgttctttcacgaccttgccagccttgactaccggcctctccacctccaccagaacatcgtggatgtgcaatatttgtacggggtggggtcaagcattgtgtcctgggccatcaagtgggagtacgtcatcctcttgtttctcctgcttgcagacgcgcgcatttgtcctgcttgtggatgatgctactcatatcccaggtggaggcagctttggagaacctcgtgctgctcaacgcggcgtctctgaccggggcgcacggtcttgtgtccttcctcgtgtttttctgctttgcatggtatctgaaggtaggtgggtgcccggagcggcctacgccctctacgggatgtggcctctcctcctgcttctgttggcgttgccccaacgggcatacgcactagacacggaagtggccgcgtcgtgtggtggcgttgtattgtcgggttaatggtgctgactctgtcaccgcactacaagcgctatatcagctggtgcttatggtggctccaatatttcctgactagagtggaagcgcaactgcacgtatgggtcccccccctcaacgtccgaggaggcgcgacgctgtcatcttgctcatgtgtgttatacacccggccttggtatttgacatcaccaagctgctgctggccgtcttcggacccctttggattcttcaaaccagtctgctcaaagtgccctacttgtgcgcgttcagggccttctccggctctgcgcgctagcgcgcaagatggccggaggccattacgtgcaaatggccatcatcaaggtgggggcgcttactggcacctacatctataaccatcttactcctcttcgggattggcgcacaacagcctacgagatctggccgtggctgtagagccagtcgtcttttcccagatggagactaagctcatcacctggggggcggacaccgccgcctgcggtgacatcatcaacggcttgcccgttctgcccgtaggggccgagagatactgctcggaccggccgacggagcggtctccaaggggtggaggttgctagcgcccatcacggcgtatgcccagcagacaaggggccttttgggatgtataattaccagcctgaccggcgggacaaaaaccaggtggagggtgaggttcagattgtgtctactgctgcccagactttcctggcaacctgcatcaacggggtgtgctggactgtctaccacggggccgggacaaggaccatcgcgtccccaagggtcccgttatccagatgtataccaatgtagaccaagacctcgtaggctggcccgctccctatggtgctcgctcattgacaccctgcacttgcggctcctcggacctttacctggtcacgaggcacgccgatgtcttcccgtacgccggcggggtgatagcaggggcagcctgctttcgcctcgacccatctcttacttgaaaggctcctcggggggcccactactgtgccccgcgggacacgccgtaggcatattcagggcgcggtgtgcacccgtggagtggctaaggcggtggactttatccccgtagagagcctagagacaaccatgaggtccccggtgttcacagacaactcctccccaccagcggtgccccagagcttccaggtggcccacctgcacctcccaccggcagcggtaagagcaccaaggtcccggccgcatacgcggctcagggctacaaggtgctggtgctcaacccctccgttgctgcaacactgggctttggcgcctacatgtccaaggcccagggattgatccgaacatcaggactggggtgaggacaattactactggcagccccatcacgtactccacctacggcaagttcctcgctgacggcgggtgctcagggggtgcttatgacataataatttgtgacgagtgccacccacggatgcaacatccatcttgggcatcggcactgtccttgaccaagcagagacagcgggggcgaggctggttgtgctcgccaccgctacccctccgggctccgtcactgtgccccactctaacatgaggaggttgctctgtccactaccggagagatccccttttacggcaaggctatcccccttgaggcaatcaagggggggagacatctcattttctgccactcaaggaaaaagtgcgacgagctcgccgcaaggctggtcgcgtgggcatcaatgctgtggcctactaccgcggccttgacgtgtccgtcatcccgaccagcggcgacgttgtcgtcgtggcaactgatgccctcatgaccggcttttccggcgacttcgactcggtgatgactgcaacacgtgtgtcacccagacagtcgacttcagccttgaccctaccttcaccattgagacaaccacgcttcctcaggacgctgtttcccgcacccaacgtcggggcaggactggcagggggaagccaggcatctatgatttgtggcaccgggagagcgcccctccggcatgttcgactcgtccgtcctctgtgagtgctatgacgcaggctgtgcttggtatgagctcacacccgccgagaccacagttaggttacgagcgtaatgaacaccccggggcttcccgtgtgccaggaccatcttgaattttgggagggcgtcttcacaggtctcacccatatagacgcccacttcttatctcagacaaagcagagtggggaaaactttccttacctggtagcgtacaagccaccgtgtgcgctagagctcaagctccccccccatcgtgggaccagatgtggaagtgcttgatccgcctcaagcccacccttcatgggccaacacctctgctatacagactgggcgctgttcaaatgaaatcaccctgacgcacccgatcaccaagtacatcatgacatgcatgtcggctgacct

SEQ ID NO: 454 - DNA, 4872 bp, Hepatitis C virus
tcgcccacaggacgtcaagttcccgggtggcggtcagatcgttggtggagtttacttgttaccgcgcaggggccctagattgggtgtgcgcgcgacgaggaagacttccgagcggtcgcaacctcgagtagacgtcagcctatccccaaggcgcgtcggcccgagggcaggacctgggctcagcccgggtacccttggcccctctatggcaatgagggctgcgggtgggcgggatggctcctgtccccccgtggtctcggcctagctggggccctacagacccccggcgtaggtcgcgcaatttgggtaaggtcatcgataccctcacgtgcggcttcgccgacctcatggggtacattccgctcgtcggcgcgcctcttggaggcgccgccaggccctggcgcatggtgtccgggttctggaggacggcgtgaactatgcaacagggaaccttcctggttgctctttctctatcttccttttggccctgctctcttgcctgactgtacccgcgtcggcctacaagttcgcaactcctcggggctttatcatgtcaccaatgattgccctaactcgagtattgtgtacgagacggccgacgccattctacactctccggggtgtgtcccttgcgtccgcgagggtaacgcctcgaagtgctggtgccggtggcccccacagtggccaccaaggacggcaaactccccacgacgcagcttcgacgtcacatcgatctgcttgtcgggagcgccaccctctgctcggccctctatgtgggggacttgtgcggtctgtcttccttgtcggtcaactgttcactttctcccccagacgccactggacaacgcaagactgcaactgttccatctaccccggccatataacgggccaccgcatggcatgggatatgatgatgaattggtctcctacacagcgctggtaatggctcaactgctcagagtcccgcaagctgtcatggacatgatcgctggagcccactggggagtcctagcgggcatagcgtatttctccatggtggggaactgggcaaaggtcttttggtgctgttgttgtttgccggcgtcgacgcgagcactcgcaccatcggggggtctgctgctgcgaccacgtccggattcgccaagctcttcgctgctggctcccgccagaatgtccagctgatcaacaccaacggaagtggcacatcaatcgcacggccttgaactgtaatgcgagtctcgacactggctgggtagcggggctcttctattaccacaaattcaactcttcgggctgccccgagaggatggccagctgtagacccctgccgatttcgaccagggctggggccctatcagctacgccaacgcaagcggcaccgaccaccccccctactgctggcactaccccccaaagccttgcggtatcgtgccggcacagaacgtatgtggcccagtatattgcttcctcccagccctgtggtggtgggaacgaccgacaagttgggcgtgcccacctacaactggggtagcaatgacacggacgtcttcgtccttaacaacaccaggccaccgttgggcaattggttcggttgacctggatggactcatatggatataccaaagtgtgcggagcgcccccttgtgtcatcggaggggtaggcaataacaccttgcactgccccactgactgtttccgcaagcatccagaagccacatactctcggtgtggctccgtccctggatcacgcccaggtgcctggtccactactcttacaggctttggcattatccttgtactgtcaactacaccctgttcaaagtcaggatgtacgtgggaggggtcgagcacaggctggaggtgcttgcaactggacgcggggcgaacgttgcgatctggacgacagggacaggtccgagctcagcccgctgctgctgtccaccacacagtggcaggttcttccgtgttctttcacgaccttgccagccttgactaccggcctctccacctccaccagaacatcgtggatgtgcaatatttgtacggggtggggtcaagcattgtgtcctgggccatcaagtgggagtacgtcatcctcttgtttctcctgcttgcagacgcgcgcatttgtcctgcttgtggatgatgctactcatatcccaggtggaggcagctttggagaacctcgtgctgctcaacgcggcgtctctgaccggggcgcacggtcttgtgtccttcctcgtgtttttctgctttgcatggtatctgaaggtaggtgggtgcccggagcggcctacgccctctacgggatgtggcctctcctcctgcttctgttggcgttgcctcaacgggcatacgcactagacacggaagtggccgcgtcgtgtggtggcgttgtattgtcgggttaatggtgctgactctgtcaccgcactacaagcgctatatcagctggtgcttatggtggctccaatatttcctgactagagtggaagcgcaactgcacgtatgggtcccccccctcaacgtccgaggaggcgcgacgctgtcatcttgctcatgtgtgttatacacccggccttggtatttgacatcaccaagctgctgctggccgtcttcggacccctttggattcttcaaaccagtctgctcaaagtgccctacttgtgcgcgttcagggccttctccggctctgcgcgctagcgcgcaagatggccggaggccattacgtgcaaatggccatcatcaaggtgggggcgcttactggcacctacatctataaccatcttactcctcttcgggattggcgcacaacagcctacgagatctggccgtggctgtagagccagtcgtcttttcccagatggagactaagctcatcacctggggggcggacaccgccgcctgcggtgacatcatcaacggcttgcccgttctgcccgtaggggccgagagatactgctcggaccggccgacggagcggtctccaaggggtggaggttgctagcgcccatcacggcgtatgcccagcagacaaggggccttttgggatgtataattaccagcctgaccggcgggacaaaaaccaggtggagggtgaggttcagattgtgtctactgctgcccagactttcctggcaacctgcatcaacggggtgtgctggactgtctaccacggggccgggacaaggaccatcgcgtccccaagggtcccgttatccagatgtataccaatgtagaccaagacctcgtaggctggcccgctccctatggtgctcgctcattgacaccctgcacttgcggctcctcggacctttacctggtcacgaggcacgccgatgtcttcccgtacgccggcggggtgatagcaggggcagcctgctttcgcctcgacccatctcttacttgaaaggctcctcggggggcccactactgtgccccgcgggacacgccgtaggcatattcagggcgcggtgtgcacccgtggagtggctaaggcggtggactttatccccgtagagagcctagagacaaccatgaggtccccggtgttcacagacaactcctccccaccagcggtgccccagagcttccaggtggcccacctgcacctcccaccggcagcggtaagagcaccaaggtcccggccgcatacgcggctcagggctacaaggtgctggtgctcaacccctccgttgctgcaacactgggctttggcgcctacatgtccaaggcccagggattgatccgaacatcaggactggggtgaggacaattactactggcagccccatcacgtactccacctacggcaagttcctcgctgacggcgggtgctcagggggtgcttatgacataataatttgtgacgagtgccacccacggatgcaacatccatcttgggcatcggcactgtccttgaccaagcagagacagcgggggcgaggctggttgtgctcgccaccgctacccctccgggctccgtcactgtgccccactctaacatgaggaggttgctctgtccactaccggagagatccccttttacggcaaggctatcccccttgaggcaatcaagggggggagacatctcattttctgccactcaaggaaaaagtgcgacgagctcgccgcaaggctggtcgcgtgggcatcaatgctgtggcctactaccgcggccttgacgtgtccgtcatcccgaccagcggcgacgttgtcgtcgtggcaactgatgccctcatgaccggcttttccggcgacttcgactcggtgatgactgcaacacgtgtgtcacccagacagtcgacttcagccttgaccctaccttcaccattgagacaaccacgcttcctcaggacgctgtttcccgcacccaacgtcggggcaggactggcagggggaagccaggcatctatgatttgtggcaccgggagagcgcccctccggcatgttcgactcgtccgtcctctgtgagtgctatgacgcaggctgtgcttggtatgagctcacacccgccgagaccacagttaggttacgagcgtaatgaacaccccggggcttcccgtgtgccaggaccatcttgaattttgggagggcgtcttcacaggtctcacccatatagacgcccacttcttatctcagacaaagcagagtggggaaaactttccttacctggtagcgtacaagccaccgtgtgcgctagagctcaagctccccccccatcgtgggaccagatgtggaagtgcttgatccgcctcaagcccacccttcatgggccaacacctctgctatacagactgggcgctgttcaaatgaaatcaccctgacgcacccgatcaccaagtacatcatgacatgcatgtcggctgacct

SEQ ID NO: 455 - DNA, 4872 bp, Hepatitis C virus
tcgcccacaggacgtcaagttcccgggtggcggtcagatcgttggtggagtttacttgttaccgcgcaggggccctagattgggtgtgcgcgcgacgaggaagacttccgagcggtcgcaacctcgagtagacgtcagcctatccccaaggcgcgtcggcccgagggcaggacctgggctcagcccgggtacccttggcccctctatggcaatgagggctgcgggtgggcgggatggctcctgtccccccgtggtctcggcctagctggggccctacagacccccggcgtaggtcgcgcaatttgggtaaggtcatcgataccctcacgtgcggcttcgccgacctcatggggtacattccgctcgtcggcgcgcctcttggaggcgccgccaggccctggcgcatggtgtccgggttctggaggacggcgtgaactatgcaacagggaaccttcctggttgctctttctctatcttccttttggccctgctctcttgcctgactgtacccgcgtcggcctacaagttcgcaactcctcggggctttatcatgtcaccaatgattgccctaactcgagtattgtgtacgagacggccgacgccattctacactctccggggtgtgtcccttgcgtccgcgagggtaacgcctcgaagtgctggtgccggtggcccccacagtggccaccaaggacggcaaactccccacgacgcagcttcgacgtcacatcgatctgcttgtcgggagcgccaccctctgctcggccctctatgtgggggacttgtgcggtctgtcttccttgtcggtcaactgttcactttctcccccagacgccactggacaacgcaagactgcaactgttccatctaccccggccatataacgggccaccgcatggcatgggatatgatgatgaattggtctcctacacagcgctggtaatggctcaactgctcagagtcccgcaagctgtcatggacatgatcgctggagcccactggggagtcctagcgggcatagcgtatttctccatggtggggaactgggcaaaggtcttttggtgctgttgttgtttgccggcgtcgacgcgagcactcgcaccatcggggggtctgctgctgcgaccacgtccggattcgccaagctcttcgctgctggctcccgccagaatgtccagctgatcaacaccaacggaagtggcacatcaatcgcacggccttgaactgtaatgcgagtctcgacactggctgggtagcggggctcttctattaccacaaattcaactcttcgggctgccccgagaggatggccagctgtagacccctgccgatttcgaccagggctggggccctatcagctacgccaacgcaagcggcaccgaccaccccccctactgctggcactaccccccaaagccttgcggtatcgtgccggcacagaacgtatgtggcccagtatattgcttcctcccagccctgtggtggtgggaacgaccgacaagttgggcgtgcccacctacaactggggtagcaatgacacggacgtcttcgtccttaacaacaccaggccaccgttgggcaattggttcggttgacctggatggactcatatggatataccaaagtgtgcggagcgcccccttgtgtcatcggaggggtaggcaataacaccttgcactgccccactgactgtttccgcaagcatccagaagccacatactctcggtgtggctccgtccctggatcacgcccaggtgcctggtccactactcttacaggctttggcattatccttgtactgtcaactacaccctgttcaaagtcaggatgtacgtgggaggggtcgagcacaggctggaggtgcttgcaactggacgcggggcgaacgttgcgatctggacgacagggacaggtccgagctcagcccgctgctgctgtccaccacacagtggcaggttcttccgtgttctttcacgaccttgccagccttgactaccggcctctccacctccaccagaacatcgtggatgtgcaatatttgtacggggtggggtcaagcattgtgtcctgggccatcaagtgggagtacgtcatcctcttgtttctcctgcttgcagacgcgcgcatttgtcctgcttgtggatgatgctactcatatcccaggtggaggcagctttggagaacctcgtgctgctcaacgcggcgtctctgaccggggcgcacggtcttgtgtccttcctcgtgtttttctgctttgcatggtatctgaaggtaggtgggtgcccggagcggcctacgccctctacgggatgtggcctctcctcctgcttctgttggcgttgccccaacgggcatacgcactagacacggaagtggccgcgtcgtgtggtggcgttgtattgtcgggttaatggtgctgactctgtcaccgcactacaagcgctatatcagctggtgcttatggtggctccaatatttcctgactagagtggaagcgcaactgcacgtatgggtcccccccctcaacgtccgaggaggcgcgacgctgtcatcttgctcatgtgtgttatacacccggccttggtatttgacatcaccaagctgctgctggccgtcttcggacccctttggattcttcaaaccagtctgctcaaagtgccctacttgtgcgcgttcagggccttctccggctctgcgcgctagcgcgcaagatggccggaggccattacgtgcaaatggccatcatcaaggtgggggcgcttactggcacctacatctataaccatcttactcctcttcgggattggcgcacaacagcctacgagatctggccgtggctgtagagccagtcgtcttttcccagatggagactaagctcatcacctggggggcggacaccgccgcctgcggtgacatcatcaacggcttgcccgttctgcccgtaggggccgagagatactgctcggaccggccgacggagcggtctccaaggggtggaggttgctagcgcccatcacggcgtatgcccagcagacaaggggccttttgggatgtataattaccagcctgaccggcgggacaaaaaccaggcggagggtgaggttcagattgtgtctactgctgcccagactttcctggcaacctgcatcaacggggtgtgctggactgtctaccacggggccgggacaaggaccatcgcgtccccaagggtcccgttatccagatgtataccaatgtagaccaagacctcgtaggctggcccgctccctatggtgctcgctcattgacaccctgcacttgcggctcctcggacctttacctgatcacgaggcacgccgatgtcttcccgtacgccggcggggtgatagcaggggcagcctgctttcgcctcgacccatctcttacttgaaaggctcctcggggggcccactactgtgccccgcgggacacgccgtaggcatattcagggcgcggtgtgcacccgtggagtggctaaggcggtggactttatccccgtagagagcctagagacaaccatgaggtccccggtgttcacagacaactcctccccaccagcggtgccccagagcttccaggtggcccacctgcacctcccaccggcagcggtaagagcaccaaggtcccggccgcatacgcggctcagggctacaaggtgctggtgctcaacccctccgttgctgcaacactgggctttggcgcctacatgtccaaggcccagggattgatccgaacatcaggactggggtgaggacaattactactggcagccccatcacgtactccacctacggcaagttcctcgctgacggcgggtgctcagggggtgcttatgacataataatttgtgacgagtgccacccacggatgcaacatccatcttgggcatcggcactgtccttgaccaagcagagacagcgggggcgaggctggttgtgctcgccaccgctacccctccgggctccgtcactgtgccccactctaacatgaggaggttgctctgtccactaccggagagatccccttttacggcaaggctatcccccttgaggcaatcaagggggggagacatctcattttctgccactcaaggaaaaagtgcgacgagctcgccgcaaggctggtcgcgtgggcatcaatgctgtggcctactaccgcggccttgacgtgtccgtcatcccgaccagcggcgacgttgtcgtcgtggcaactgatgccctcatgaccggcttttccggcgacttcgactcggtgatgactgcaacacgtgtgtcacccagacagtcgacttcagccttgaccctaccttcaccattgagacaaccacgcttcctcaggacgctgtttcccgcacccaacgtcggggcaggactggcagggggaagccaggcatctatgatttgtggcaccgggagagcgcccctccggcatgttcgactcgtccgtcctctgtgagtgctatgacgcaggctgtgcttggtatgagctcacacccgccgagaccacagttaggttacgagcgtaatgaacaccccggggcttcccgtgtgccaggaccatcttgaattttgggagggcgtcttcacaggtctcacccatatagacgcccacttcttatctcagacaaagcagagtggggaaaactttccttacctggtagcgtacaagccaccgtgtgcgctagagctcaagctccccccccatcgtgggaccagatgtggaagtgcttgatccgcctcaagcccacccttcatgggccaacacctctgctatacagactgggcgctgttcaaatgaaatcaccctgacgcacccgatcaccaagtacatcatgacatgcatgtcggctgacct

SEQ ID NO: 456 - DNA, 4872 bp, Hepatitis C virus
tcgcccacaggacgtcaagttcccgggtggcggtcagatcgttggtggagtttacttgttaccgcgcaggggccctagattgggtgtgcgcgcgacgaggaagacttccgagcggtcgcaacctcgagtagacgtcagcctatccccaaggcgcgtcggcccgagggcaggacctgggctcagcccgggtacccttggcccctctatggcaatgagggctgcgggtgggcgggatggctcctgtccccccgtggtctcggcctagctggggccctacagacccccggcgtaggtcgcgcaatttgggtaaggtcatcgataccctcacgtgcggcttcgccgacctcatggggtacattccgctcgtcggcgcgcctcttggaggcgccgccaggccctggcgcatggtgtccgggttctggaggacggcgtgaactatgcaacagggaaccttcctggttgctctttctctatcttccttttggccctgctctcttgcctgactgtacccgcgtcggcctacaagttcgcaactcctcggggctttatcatgtcaccaatgattgccctaactcgagtattgtgtacgagacggccgacgccattctacactctccggggtgtgtcccttgcgtccgcgagggtaacgcctcgaagtgctggtgccggtggcccccacagtggccaccaaggacggcaaactccccacgacgcagcttcgacgtcacatcgatctgcttgtcgggagcgccaccctctgctcggccctctatgtgggggacttgtgcggtctgtcttccttgtcggtcaactgttcactttctcccccagacgccactggacaacgcaagactgcaactgttccatctaccccggccatataacgggccaccgcatggcatgggatatgatgatgaattggtctcctacacagcgctggtaatggctcaactgctcagagtcccgcaagctgtcatggacatgatcgctggagcccactggggagtcctagcgggcatagcgtatttctccatggtggggaactgggcaaaggtcttttggtgctgttgttgtttgccggcgtcgacgcgagcactcgcaccatcggggggtctgctgctgcgaccacgtccggattcgccaagctcttcgctgctggctcccgccagaatgtccagctgatcaacaccaacggaagtggcacatcaatcgcacggccttgaactgtaatgcgagtctcgacactggctgggtagcggggctcttctattaccacaaattcaactcttcgggctgccccgagaggatggccagctgtagacccctgccgatttcgaccagggctggggccctatcagctacgccaacgcaagcggcaccgaccaccccccctactgctggcactaccccccaaagccttgcggtatcgtgccggcacagaacgtatgtggcccagtatattgcttcctcccagccctgtggtggtgggaacgaccgacaagttgggcgtgcccacctacaactggggtagcaatgacacggacgtcttcgtccttaacaacaccaggccaccgttgggcaattggttcggttgacctggatggactcatatggatataccaaagtgtgcggagcgcccccttgtgtcatcggaggggtaggcaataacaccttgcactgccccactgactgtttccgcaagcatccagaagccacatactctcggtgtggctccgtccctggatcacgcccaggtgcctggtccactactcttacaggctttggcattatccttgtactgtcaactacaccctgttcaaagtcaggatgtacgtgggaggggtcgagcacaggctggaggtgcttgcaactggacgcggggcgaacgttgcgatctggacgacagggacaggtccgagctcagcccgctgctgctgtccaccacacagtggcaggttcttccgtgttctttcacgaccttgccagccttgactaccggcctctccacctccaccagaacatcgtggatgtgcaatatttgtacggggtggggtcaagcattgtgtcctgggccatcaagtgggagtacgtcatcctcttgtttctcctgcttgcagacgcgcgcatttgtcctgcttgtggatgatgctactcatatcccaggtggaggcagctttggagaacctcgtgctgctcaacgcggcgtctctgaccggggcgcacggtcttgtgtccttcctcgtgtttttctgctttacatggtatctgaaggtaggtgggtgcccggagcggcctacgccctctacgggatgtggcctctcctcctgcttctgttggcgttgccccaacgggcatacgcactagacacggaagtggccgcgtcgtgtggtggcgttgtattgtcgggttaatggtgctgactctgtcaccgcactacaagcgctatatcagctggtgcttatggtggctccaatatttcctgactagagtggaagcgcaactgcacgtatgggtcccccccctcaacgtccgaggaggcgcgacgctgtcatcttgctcatgtgtgttatacacccggccttggtatttgacatcaccaagctgctgctggccgtcttcggacccctttggattcttcaaaccagtctgctcaaagtgccctacttgtgcgcgttcagggccttctccggctctgcgcgctagcgcgcaagatggccggaggccattacgtgcaaatggccatcatcaaggtgggggcgcttactggcacctacatctataaccatcttactcctcttcgggattggcgcacaacagcctacgagatctggccgtggctgtagagccagtcgtcttttcccagatggagactaagctcatcacctggggggcggacaccgccgcctgcggtgacatcatcaacggcttgcccgttctgcccgtaggggccgagagatactgctcggaccggccgacggagcggtctccaaggggtggaggttgctagcgcccatcacggcgtatgcccagcagacaaggggccttttgggatgtataattaccagcctgaccggcgggacaaaaaccaggtggagggtgaggttcagattgtgtctactgctgcccagactttcctggcaacctgcatcaacggggtgtgctggactgtctaccacggggccgggacaaggaccatcgcgtccccaagggtcccgttatccagatgtataccaatgtagaccaagacctcgtaggctggcccgctccctatggtgctcgctcattgacaccctgcacttgcggctcctcggacctttacctggtcacgaggcacgccgatgtcttcccgtacgccggcggggtgatagcaggggcagcctgctttcgcctcgacccatctcttacttgaaaggctcctcggggggcccactactgtgccccgcgggacacgccgtaggcatattcagggcgcggtgtgcacccgtggagtggctaaggcggtggactttatccccgtagagagcctagagacaaccatgaggtccccggtgttcacagacaactcctccccaccagcggtgccccagagcttccaggtggcccacctgcacctcccaccggcagcggtaagagcaccaaggtcccggccgcatacgcggctcagggctacaaggtgctggtgctcaacccctccgttgctgcaacactgggctttggcgcctacatgtccaaggcccagggattgatccgaacatcaggactggggtgaggacaattactactggcagccccatcacttactccacctacggcaagttcctcgctgacggcgggtgctcagggggtgcttatgacataataatttgtgacgagtgccacccacggatgcaacatccatcttgggcatcggcactgtccttgaccaagcagagacagcgggggcgaggctggttgtgctcgccaccgctacccctccgggctccgtcactgtgccccactctaacatgaggaggttgctctgtccactaccggagagatccccttttacggcaaggctatcccccttgaggcaatcaagggggggagacatctcattttctgccactcaaggaaaaagtgcgacgagctcgccgcaaggctggtcgcgtgggcatcaatgctgtggcctactaccgcggccttgacgtgtccgtcatcccgaccagcggcgacgttgtcgtcgtggcaactgatgccctcatgaccggcttttccggcgacttcgactcggtgatgactgcaacacgtgtgtcacccagacagtcgacttcagccttgaccctaccttcaccattgagacaaccacgcttcctcaggacgctgtttcccgcacccaacgtcggggcaggactggcagggggaagccaggcatctatgatttgtggcaccgggagagcgcccctccggcatgttcgactcgtccgtcctctgtgagtgctatgacgcaggctgtgcttggtatgagctcacacccgccgagaccacagttaggttacgagcgtaatgaacaccccggggcttcccgtgtgccaggaccatcttgaattttgggagggcgtcttcacaggtctcacccatatagacgcccacttcttatctcagacaaagcagagtggggaaaactttccttacctggtagcgtacaagccaccgtgtgcgctagagctcaagctccccccccatcgtgggaccagatgtggaagtgcttgatccgcctcaagcccacccttcatgggccaacacctctgctatacagactgggcgctgttcaaatgaaatcaccctgacgcacccgatcaccaagtacatcatgacatgcatgtcggctgacct

SEQ ID NO: 457 - DNA, 4872 bp, Hepatitis C virus
tcgcccacaggacgtcaagttcccgggtggcggtcagatcgttggtggagtttacttgttaccgcgcaggggccctagattgggtgtgcgcgcgacgaggaagacttccgagcggtcgcaacctcgagtagacgtcagcctatccccaaggcgcgtcggcccgagggcaggacctgggctcagcccgggtacccttggcccctctatggcaatgagggctgcgggtgggcgggatggctcctgtccccccgtggtctcggcctagctggggccctacagacccccggcgtaggtcgcgcaatttgggtaaggtcatcgataccctcacgtgcggcttcgccgacctcatggggtacattccgctcgtcggcgcgcctcttggaggcgccgccaggccctggcgcatggtgtccgggttctggaggacggcgtgaactatgcaacagggaaccttcctggttgctctttctctatcttccttttggccctgctctcttgcctgactgtacccgcgtcggcctacaagttcgcaactcctcggggctttatcatgtcaccaatgattgccctaactcgagtattgtgtacgagacggccgacgccattctacactctccggggtgtgtcccttgcgtccgcgagggtaacgcctcgaagtgctggtgccggtggcccccacagtggccaccaaggacggcaaactccccacgacgcagcttcgacgtcacatcgatctgcttgtcgggagcgccaccctctgctcggccctctatgtgggggacttgtgcggtctgtcttccttgtcggtcaactgttcactttctcccccagacgccactggacaacgcaagactgcaactgttccatctaccccggccatataacgggccaccgcatggcatgggatatgatgatgaattggtctcctacacagcgctggtaatggctcaactgctcagagtcccgcaagctgtcatggacatgatcgctggagcccactggggagtcctagcgggcatagcgtatttctccatggtggggaactgggcaaaggtcttttggtgctgttgttgtttgccggcgtcgacgcgagcactcgcaccatcggggggtctgctgctgcgaccacgtccggattcgccaagctcttcgctgctggctcccgccagaatgtccagctgatcaacaccaacggaagtggcacatcaatcgcacggccttgaactgtaatgcgagtctcgacactggctgggtagcggggctcttctattaccacaaattcaactcttcgggctgccccgagaggatggccagctgtagacccctgccgatttcgaccagggctggggccctatcagctacgccaacgcaagcggcaccgaccaccccccctactgctggcactaccccccaaagccttgcggtatcgtgccggcacagaacgtatgtggcccagtatattgcttcctcccagccctgtggtggtgggaacgaccgacaagttgggcgtgcccacctacaactggggtagcaatgacacggacgtcttcgtccttaacaacaccaggccaccgttgggcaattggttcggttgacctggatggactcatatggatataccaaagtgtgcggagcgcccccttgtgtcatcggaggggtaggcaataacaccttgcactgccccactgactgtttccgcaagcatccagaagccacatactctcggtgtggctccgtccctggatcacgcccaggtgcctggtccactactcttacaggctttggcattatccttgtactgtcaactacaccctgttcaaagtcaggatgtacgtgggaggggtcgagcacaggctggaggtgcttgcaactggacgcggggcgaacgttgcgatctggacgacagggacaggtccgagctcagcccgctgctgctgtccaccacacagtggcaggttcttccgtgttctttcacgaccttgccagccttgactaccggcctctccacctccaccagaacatcgtggatgtgcaatatttgtacggggtggggtcaagcattgtgtcctgggccatcaagtgggagtacgtcatcctcttgtttctcctgcttgcagacgcgcgcatttgtcctgcttgtggatgatgctactcatatcccaggtggaggcagctttggagaacctcgtgctgctcaacgcggcgtctctgaccggggcgcacggtcttgtgtccttcctcgtgtttttctgctttgcatggtatctgaaggtaggtgggtgcccggagcggcctacgccctctacgggatgtggcctctcctcctgcttctgttggcgttgccccaacgggcatacgcactagacacggaagtggccgcgtcgtgtggtggcgttgtattgtcgggttaatggtgctgactctgtcaccgcactacaagcgctatatcagctggtgcttatggtggctccaatatttcctgactagagtggaagcgcaactgcacgtatgggtcccccccctcaacgtccgaggaggcgcgacgctgtcatcttgctcatgtgtgttatacacccggccttggtatttgacatcaccaagctgctgctggccgtcttcggacccctttggattcttcaaaccagtctgctcaaagtgccctacttgtgcgcgttcagggccttctccggctctgcgcgctagcgcgcaagatggccggaggccattacgtgcaaatggccatcatcaaggtgggagcgcttactggcacctacatctataaccatcttactcctcttcgggattggcgcacaacagcctacgagatctggccgtggctgtagagccagtcgtcttttcccagatggagactaagctcatcacctggggggcggacaccgccgcctgcggtgacatcatcaacggcttgcccgttctgcccgtaggggccgagagatactgctcggaccggccgacggagcggtctccaaggggtggaggttgctagcgcccatcacggcgtatgcccagcagacaaggggccttttgggatgtataattaccagcctgaccggcgggacaaaaaccaggtggagggtgaggttcagattgtgtctactgctgcccagactttcctggcaacctgcatcaacggggtgtgctggactgtctaccacggggccgggacaaggaccatcgcgtccccaagggtcccgttatccagatgtataccaatgtagaccaagacctcgtaggctggcccgctccctatggtgctcgctcattgacaccctgcacttgcggctcctcggacctttacctggtcacgaggcacgccgatgtcttcccgtacgccggcggggtgatagcaggggcagcctgctttcgcctcgacccatctcttacttgaaaggctcctcggggggcccactactgtgccccgcgggacacgccgtaggcatattcagggcgcggtgtgcacccgtggagtggctaaggcggtggactttatccccgtagagagcctagagacaaccatgaggtccccggtgttcacagacaactcctccccaccagcggtgccccagagcttccaggtggcccacctgcacctcccaccggcagcggtaagagcaccaaggtcccggccgcatacgcggctcagggctacaaggtgctggtgctcaacccctccgttgctgcaacactgggctttggcgcctacatgtccaaggcccagggattgatccgaacatcaggactggggtgaggacaattactactggcagccccatcacgtactccacctacggcaagttcctcgctgacggcgggtgctcagggggtgcttatgacataataatttgtgacgagtgccacccacggatgcaacatccatcttgggcatcggcactgtccttgaccaagcagagacagcgggggcgaggctggttgtgctcgccaccgctacccctccgggctccgtcactgtgccccactctaacatgaggaggttgctctgtccactaccggagagatccccttttacggcaaggctatcccccttgaggcaatcaagggggggagacatctcattttctgccactcaaggaaaaagtgcgacgagctcgccgcaaggctggtcgcgtgggcatcaatgctgtggcctactaccgcggccttgacgtgtccgtcatcccgaccagcggcgacgttgtcgtcgtggcaactgatgccctcatgaccggcttttccggcgacttcgactcggtgatgactgcaacacgtgtgtcacccagacagtcgacttcagccttgaccctaccttcaccattgagacaaccacgcttcctcaggacgctgtttcccgcacccaacgtcggggcaggactggcagggggaagccaggcatctatgatttgtggcaccgggagagcgcccctccggcatgttcgactcgtccgtcctctgtgagtgctatgacgcaggctgtgcttggtatgagctcacacccgccgagaccacagttaggttacgagcgtaatgaacaccccggggcttcccgtgtgccaggaccatcttgaattttgggagggcgtcttcacaggtctcacccatatagacgcccacttcttatctcagacaaagcagagtggggaaaactttccttacctggtagcgtacaagccaccgtgtgcgctagagctcaagctccccccccatcgtgggaccagatgtggaagtgcttgatccgcctcaagcccacccttcatgggccaacacctctgctatacagactgggcgctgttcaaatgaaatcaccctgacgcacccgatcaccaagtacatcatgacatgcatgtcggctgacct

SEQ ID NO: 458 - DNA, 4869 bp, Hepatitis C virus
tcgcccacaggacgtcaagttcccgggcggcggccagatcgttggtggagtttacttgttgccgcgcaggggccctagattgggtgtgcgcgcgacgaggaagacttccgagcggtcgcaacctcgagtagacgtcagcctatccccaaggcgcgtcggtccgagggcaggacctgggctcagcccgggtacccttggcccctctatggcaatgagggttgcggatgggcgggatggctcctgtccccccgtggtctcggcctagctggggccccacagacccccggcgtaggtcgcgcaatttgggcaaggtcatcgataccctcacgtgcggcttcgccgacctcatggggtacataccgctcgtcggcgcccctcttgggggcgctgccaggccctggcgcatggagtccgggttctggaagacggcgtgaattatgcaacagggaacctccccggttgctctttctctatcttccttctggccttgctctcttgcctgactgtgcccgcttcagcctacaagtgcgcaactccacggggctttaccatgtcaccaatgattgccctaattcgagtattgtgtacgaggcggccgatgctatcctgcacaccccggggtgtgtcccttgcgttcgtaagggtaacacctcggtgtgttggtggcggtaacccctacggtggccaccagggacggcaaactccccacaacgcagcttcgacgtcatatcgatctgctcgtcgggagtgccaccctctgttcggccctctatgtgggggacctgtgcggtctgtctttcttgttggccaactgtttaccctctctcccagacgccactggacaacgcaaggctgcaattgttccatctatcccggccatataacgggccaccgcatggcatgggatatgatgatgaactggtcccctacacggcgttggtaatggcacagctgctccggatcccacaagccatcatggacatgatcgctggtgctcactggggagtcctggcgggcatagcgtatttctctatggtggggaactgggcgaaggtcctgtagtgctgctgctatttgccggcgtcgacgcaaaaacttatgtcaccgggggagctgctgcccacaccacgtccggacttgctgggctcttcttacaaggccccaagcagaacgtccacttgatcaacaccaacggcagtggcacatcaatagtacggccttgaactgcaacgctagccttgacaccggctggatagcagggcttttctattacaacaaattcaactcttcaggttgtcccgagaggttggccagctgccgactcctactgattttgaccagggctggggccctatcagtcatgccaacggaagcggccccgaccaacgcccctactgctggcactaccccccaaaaccttgcggcattgtgcccgcgaagagtgtgtgtggcccggtatattgcttcctcccagccctgtggtggtgggaacgaccgacaggtcgggcgaacctacctacaactggggtgaaaatgatacggacgtcttcgtccttaacaacatcaggccaccgctgggtaattggtttggttgacctggatgaactcaactggattcaccaaagtgtgcggggcgcctccttgtgacatcgggggggcgggcaacaacaccttgcactgccccactgattgtttccgcaagcatccggaagccacgtactctcggtgcggctccgtccctggatcacgcccaggtgcctggtccactacccatacaggctttggcattatccctgtaccatcaactacaccatatttaaagtcaggatgtacgtgggagggatcgagcacaggttggaagcgcctgcaactggacgcggggcgagcgttgcgatctggaagacagggacaggtccgagcttagcccgttgctgctgtctaccacacagtggcaagtccttccgtgttccttcacggccatgccagccttgtccaccggcctctccacctccaccagaacattgtggatgtgcagtatttgtacggggtggggtcaagcattgcgtcctgggccattaagtgggagtacgtcgttctcctgttccttttgcttgcagacgcgcgcgtctgtcctgcttgtggatgatgttactcatatcccaagcggaggcggctttggagaaccttgtaatactcaatgcagcatccctggccgggacgcacggtcttgtatccttcctcgtgttcttctgctttgcatggtatctgaaagcaggtgggtgcccggagcggcttacgccttctacgggatgtggcctctcctcctgctcctgctggcgttgccccagcgggcatacgcgctggacacggaggtggccgcgtcgtgtggcggcgttgtcttgtcgggttaatggcgctgactttatcaccacactacaagcgctatatcagctggtgcttatggtggcttcagtattttctgaccagagcggaagcgcagctgcacgtgtgggttccccccctcaacgtccgggggggggtgacgctgtcatcttactcatgtgtgttgtacacccgactctggtattcgacatcaccaaaatgctgctggccgtctatggacccctctggattcttcaagccagtttgcttgaggtaccctacttgtgcgcgtccaaggccttctccggatctgcgcgctagcgcggaagatggtcggaggccattacgtgcaaatggccatcatcaagttaggggcgcttactggcacctatatttataatcatctcacccctcttcaggactggcgcacaacggcctgcgagacctggccgcggctgtagagccagtcgtcttctcccaaatggagaccaagctcatcacgtggggggcagacactgccgcgtgcggtgacattgtcgacggcttacccgttccgcccgtaggggccgggagatactgcttgggccggccgatggaatggtctccaaggggtggaggttgctggcgcccatcacggcgtacgcccagcagacaaggggcctcctagggtgtataatcaccagcctaactggcgggacaaaaaccaagtggaaggtgaggtccagattgtgtcgactgctgcccaaactttcctggcaacgtgcatcaatggggtatgctggactgtctaccacggggccggaacgaggaccatcgcatccccaagggtcctgttatccagatgtataccaatgtagaccaagaccttgtgggctggcccgctcctcaaggtgcccgctcattgacaccctgcacctgcggctcctcggacctttacttggtcacgaggcacgccgatgtcttcccgtgcgccggcggggtgatagcaggggcagcctgctctcgccccggcctatttcctacttgaaaggctcctcgggaggtccgctgttgtgccccgcgggacacgccgtgggcatatttagggcgcggtgtgtacccgtggagtggctaaggcggtggactttatccccgtggagagcctggaaacaaccatgaggtccccggtgtttacggacaactcctccccaccagcggtgccccagaccttccaggtggcccatttgcatctcccacaggcagcggcaagagcaccaaagtcccggctgcatatgcagctcagggttataaggtgctagtgctcaacccctctgtcgctgcaacattgggctttggtgcctacatgtctaaggcccagggatcgatcctaacatcaggaccggggtgaggacaattaccactggcagccccatcacgtactccacctacggtaagttccttgccgacggcgggtgctcagggggcgcttatgacataataatctgtgacgagtgccatccacggatgccacatccatcttgggcatcggcactgtccttgaccaagcagagaccgcgggggcgagactggttgtgctcgccaccgctacccctccgggctctatcactgtgccacatcccaacatgaggaggttgctctgtccaccaccggagagatccctttttacggcaaggccatcccccttgatgtaatcaagggggggagacatctcattttctgtcactcaaagaagaagtgtgacgagcttgccgcaaagctggtcgcatgggcgtcaatgccgtggcctactaccgcggtctcgacgtatctgtcatcccgaccggcggcgatgttgtcgtcgtggcaactgatgctctcatgaccggctttactggcgacttcgactcggtgatgactgcaacacgtgcgtcacccagacagtcgatttcagccttgaccctaccttcaccattgagacaaccacgcttccccaggatgctgtctcccgcactcaacgtcggggcaggactggcagggggaggcaaggcacctacgatttgtggcaccgggggagcgcccctctggcatgttcgactcgtctgtcctctgtgagtgctatgacgcgggctgtgcttggtacgagctcacgcctgccgagaccacagttaggctacgagcgtaatgaacaccccggggcttcccgtgtgtcaagaccatcttgaattttgggagggcgtctttacaggcctcacccatatagatgcccacttcctatcccagacaaaacagagcggggagaatcttccttacctggtagcgtacaagccaccgtgtgcgctagggcgcaagccccccccccatcgtgggaccagatgtggaagtgtttggtccgcctcaaacccaccctccacgggccaacacccctgctatacagactgggtgctgttcaaatgaagtcaccctgacgcacccagtcaccaaatacatcatgacatgtatgtcggctga

SEQ ID NO: 459 - DNA, 4869 bp, Hepatitis C virus
tcgcccacaggacgtcaagttcccgggcggcggccagatcgttggtggagtttacttgttgccgcgcaggggccctagattgggtgtgcgcgcgacgaggaagacttccgagcggtcgcaacctcgagtagacgtcagcctatccccaaggcgcgtcggtccgagggcaggacctgggctcagcccgggtacccttggcccctctatggcaatgagggttgcggatgggcgggatggctcctgtccccccgtggtctcggcctagctggggccccacagacccccggcgtaggtcgcgcaatttgggcaaggtcatcgataccctcacgtgcggcttcgccgacctcatggggtacataccgctcgtcggcgcccctcttgggggcgctgccaggccctggcgcatggagtccgggttctggaagacggcgtgaattatgcaacagggaacctccccggttgctctttctctatcttccttctggccttgctctcttgcctgactgtgcccgcttcagcctacaagtgcgcaactccacggggctttaccatgtcaccaatgattgccctaattcgagtattgtgtacgaggcggccgatgctatcctgcacaccccggggtgtgtcccttgcgttcgtaagggtaacacctcggtgtgttggtggcggtaacccctacggtggccaccagggacggcaaactccccacaacgcagcttcgacgtcatatcgatctgctcgtcgggagtgccaccctctgttcggccctctatgtgggggacctgtgcggtctgtctttcttgttggccaactgtttaccctctctcccagacgccactggacaacgcaaggctgcaattgttccatctatcccggccatataacgggccaccgcatggcatgggatatgatgatgaactggtcccctacacggcgttggtaatggcacagctgctccggatcccacaagccatcatggacatgatcgctggtgctcactggggagtcctggcgggcatagcgtatttctctatggtggggaactgggcgaaggtcctgtagtgctgctgctatttgccggcgtcgacgcaaaaacttatgtcaccgggggagctgctgcccacaccacgtccggacttgctgggctcttcttacaaggccccaagcagaacgtccacttgatcaacaccaacggcagtggcacatcaatagtacggccttgaactgcaacgctagccttgacaccggctggatagcagggcttttctattataacaaattcaactcttcaggttgtcccgagaggttggccagctgccgactcctactgattttgaccagggctggggccctatcagtcatgccaacggaagcggccccgaccaacgcccctactgctggcactaccccccaaaaccttgcggcattgtgcccgcgaagagtgtgtgtggcccggtatattgcttcctcccagccctgtggtggtgggaacgaccgacgggtcgggcgtacctacctacaactggggtgaaaatgatacggacgtcttcgtccttaacaacatcaggccaccgctgggtaattggtttggttgacctggatgaactcaactggattcaccaaagtgtgcggggcgcctccttgtgacatcgggggggcgggcaacaacaccttgcactgccccactgattgtttccgcaagcatccggaagccacgtactctcggtgcggctccgtccctggatcacgcccaggtgcctggtccactacccatacaggctttggcattatccctgtaccatcaactacaccatatttaaagtcaggatgtacgtgggagggatcgagcacaggttggaagcgcctgcaactggacgcggggcgagcgttgcgatctggaagacagggacaggtccgagcttagcccgttgctgctgtctaccacacagtggcaagtccttccgtgttccttcacggccatgccagccttgtccaccggcctctccacctccaccagaacattgtggatgtgcagtatttgtacggggtggggtcaagcattgcgtcctgggccattaagtgggagtacgtcgttctcctgttccttttgcttgcagacgcgcgcgtctgtcctgcttgtggatgatgttactcatatcccaagcggaggcggctttggagaaccttgtaatactcaatgcagcatccctggccgggacgcacggtcttgtatccttcctcgtgttcttctgctttgcatggtatctgaaagcaggtgggtgcccggagcggcttacgccttctacgggatgtggcctctcctcctgctcctgctggcgttgccccagcgggcatacgcgctggacacggaggtggccgcgtcgtgtggcggcgttgtcttgtcgggttaatggcgctggctttatcaccacactacaagcgctatatcagctggtgcttatggtggcttcagtattttctgaccagagcggaagcgcagctgcacgtgtgggttccccccctcaacgtccgggggggggtgacgctgtcatcttactcatgtgtgttgtacacccgactctggtattcgacatcaccaaaatgctgctggccgtctatggacccctctggattcttcaagccagtttgcttgaggtaccctacttgtgcgcgtccaaggccttctccggatctgcgcgctagcgcggaagatggtcggaggccattacgtgcaaatggccatcatcaagttaggggcgcttactggcacctatatttataatcatctcacccctcttcaggactggcgcacaacggcctgcgagacctggccgcggctgtagagccagtcgtcttctcccaaatggagaccaagctcatcacgtggggggcagacactgccgcgtgcggtgacattgtcgacggcttacccgttccgcccgtaggggccgggagatactgcttgggccggccgatggaatggtctccaaggggtggaggttgctggcgcccatcacggcgtacgcccagcagacaaggggcctcctagggtgtataatcaccagcctaactggcgggacaaaaaccaagtggaaggtgaggtccagattgtgtcgactgctgcccaaactttcctggcaacgtgcatcaatggggtatgctggactgtctaccacggggccggaacgaggaccatcgcatccccaagggtcctgttatccagatgtataccaatgtagaccaagaccttgtgggctggcccgctcctcaaggtgcccgctcattgacaccctgcacctgcggctcctcggacctttacttggtcacgaggcacgccgatgtcttcccgtgcgccggcggggtgatagcaggggcagcctgctctcgccccggcctatttcctacttgaaaggctcctcgggaggtccgctgttgtgccccgcgggacacgccgtgggcatatttagggcgcggtgtgtacccgtggagtggctaaggcggtggactttatccccgtggagagcctggaaacaaccatgaggtccccggtgtttacggacaactcctccccactagcggtgccccagaccttccaggtggcccatttgcatctcccacaggcagcggcaagagcaccaaagtcccggctgcatatgcagctcagggttataaggtgctagtgctcaacccctctgtcgctgcaacattgggctttggtgcctacatgtctaaggcccagggatcgatcctaacatcaggaccggggtgaggacaattaccactggcagccccatcacgtactccacctacggtaagttccttgccgacggcgggtgctcagggggcgcttatgacataataatctgtgacgagtgccatccacggatgccacatccatcttgggcatcggcactgtccttgaccaagcagagaccgcgggggcgagactggttgtgctcgccaccgctacccctccgggctctatcactgtgccacatcccaacatgaggaggttgctctgtccaccaccggagagatccctttttacggcaaggccatcccccttgatgtaatcaagggggggagacatctcattttctgtcactcaaagaagaagtgtgacgagcttgccgcaaagctggtcgcatgggcgtcaatgccgtggcctactaccgcggtctcgacgtatctgtcatcccgaccggcggcgatgttgtcgtcgtggcaactgatgctctcatgaccggctttactggcgacttcgactcggtgatgactgcaacacgtgcgtcacccagacagtcgatttcagccttgaccctaccttcaccattgagacaaccacgcttccccaggatgctgtctcccgcactcaacgtcggggcaggactggcagggggaggcaaggcacctacgatttgtggcaccgggggagcgcccctctggcatgttcgactcgtctgtcctctgtgagtgctatgacgcgggctgtgcttggtacgagctcacgcctgccgagaccacagttaggctacgagcgtaatgaacaccccggggcttcccgtgtgtcaagaccatcttgaattttgggagggcgtctttacaggcctcacccatatagatgcccacttcctatcccagacaaaacagagcggggagaatcttccttacctggtagcgtacaagccaccgtgtgcgctagggcgcaagccccccccccatcgtgggaccagatgtggaagtgtttggtccgcctcaaacccaccctccacgggccaacacccctgctatacagactgggtgctgttcaaatgaagtcaccctgacgcacccagtcaccaaatacatcatgacatgtatgtcggctga

SEQ ID NO: 460 - DNA, 4869 bp, Hepatitis C virus
tcgcccacaggacgtcaagttcccgggcggcggccagatcgttggtggagtttacttgttgccgcgcaggggccctagattgggtgtgcgcgcgacgaggaagacttccgagcggtcgcaacctcgagtagacgtcagcctatccccaaggcgcgtcggtccgagggcaggacctgggctcagcccgggtacccttggcccctctatggcaatgagggttgcggatgggcgggatggctcctgtccccccgtggtctcggcctagctggggccccacagacccccggcgtaggtcgcgcaatttgggcaaggtcatcgataccctcacgtgcggcttcgccgacctcatggggtacataccgctcgtcggcgcccctcttgggggcgctgccaggccctggcgcatggagtccgggttctggaagacggcgtgaattatgcaacagggaacctccccggttgctctttctctatcttccttctggccttgctctcttgcctgactgtgcccgcttcagcctacaagtgcgcaactccacggggctttaccatgtcaccaatgattgccctaattcgagtattgtgtacgaggcggccgatgctatcctgcacaccccggggtgtgtcccttgcgttcgtaagggtaacacctcggtgtgttggtggcggtaacccctacggtggccaccagggacggcaaactccccacaacgcagcttcgacgtcatatcgatctgctcgtcgggagtgccaccctctgttcggccctctatgtgggggacctgtgcggtctgtctttcttgttggccaactgtttaccctctctcccagacgccactggacaacgcaaggctgcaattgttccatctatcccggccatataacgggccaccgcatggcatgggatatgatgatgaactggtcccctacacggcgttggtaatggcacagctgctccggatcccacaagccatcatggacatgatcgctggtgctcactggggagtcctggcgggcatagcgtatttctctatggtggggaactgggcgaaggtcctgtagtgctgctgctatttgccggcgtcgacgcaaaaacttatgtcaccgggggagctgctgcccacaccacgtccggacttgctgggctcttcttacaaggccccaagcagaacgtccacttgatcaacaccaacggcagtggcacatcaatagtacggccttgaactgcaacgctagccttgacaccggctggatagcagggcttttctattacaacaaattcaactcttcaggttgtcccgagaggttggccagctgccgactcctactgattttgaccagggctggggccctatcagtcatgccaacggaagcggccccgaccaacgcccctactgctggcactaccccccaaaaccttgcggcattgtgcccgcgaagagtgtgtgtggcccggtatattgcttcctcccagccctgtggtggtgggaacgaccgacaggtcgggcgaacctacctacaactggggtgaaaatgatacggacgtcttcgtccttaacaacatcaggccaccgctgggtaattggtttggttgacctggatgaactcaaccggattcaccaaagtgtgcggggcgcctccttgtgacatcgggggggcgggcaacaacaccttgcactgccccactgattgtttccgcaagcatccggaagccacgtactctcggtgcggctccgtccctggatcacgcccaggtgcctggtccactacccatacaggctttggcattatccctgtaccatcaactacaccatatttaaagtcaggatgtacgtgggagggatcgagcacaggttggaagcgcctgcaactggacgcggggcgagcgttgcgatctggaagacagggacaggtccgagcttagcccgttgctgctgtctaccacacagtggcaagtccttccgtgttccttcacggccatgccagccttgtccaccggcctctccacctccaccagaacattgtggatgtgcagtatttgtacggggtggggtcaagcattgcgtcctgggccattaagtgggagtacgtcgttctcctgttccttttgcttgcagacgcgcgcgtctgtcctgcttgtggatgatgttactcatatcccaagcggaggcggctttggagaaccttgtaatactcaatgcagcatccctggccgggacgcacggtcttgtatccttcctcgtgttcttctgctttgcatggtatctgaaagcaggtgggtgcccggagcggcttacgccttctacgggatgtggcctctcctcctgctcctgctggcgttgccccagcgggcatacgcgctggacacggaggtggccgcgtcgtgtggcggcgttgtcttgtcgggttaatggcgctgactttatcaccacactacaagcgctatatcagctggtgcttatggtggcttcagtattttctgaccagagcggaagcgcagctgcacgtgtgggttccccccctcaacgtccgggggggggtgacgctgtcatcttactcatgtgtgttgtacacccgactctggtattcgacatcaccaaaatgctgctggccgtctatggacccctctggattcttcaagccagtttgcttgaggtaccctacttgtgcgcgtccaaggccttctccggatctgcgcgctagcgcggaagatggtcggaggccattacgtgcaaatggccatcatcaagttaggggcgcttactggcacctatatttataatcatctcacccctcttcaggactggcgcacaacggcctgcgagacctggccgcggctgtagagccagtcgtcttctcccaaatggagaccaagctcatcacgtggggggcagacactgccgcgtgcggtgacattgtcgacggcttacccgttccgcccgtaggggccgggagatactgcttgggccggccgatggaatggtctccaaggggtggaggttgctggcgcccatcacggcgtacgcccagcagacaaggggcctcctagggtgtataatcaccagcctaactggcgggacaaaaaccaagtggaaggtgaggtccagattgtgtcgactgctgcccaaactttcctggcaacgtgcatcaatggggtatgctggactgtctaccacggggccggaacgaggaccatcgcatccccaagggtcctgttatccagatgtataccaatgtagaccaagaccttgtgggctggcccgctcctcaaggtgcccgctcattgacaccctgcacctgcggctcctcggacctttacttggtcacgaggcacgccgatgtcttcccgtgcgccggcggggtgatagcaggggcagcctgctctcgccccggcctatttcctacttgaaaggctcctcgggaggtccgctgttgtgccccgcgggacacgccgtgggcatatttagggcgcggtgtgtacccgtggagtggctaaggcggtggactttatccccgtggagagcctggaaacaaccatgaggtccccggtgtttacggacaactcctccccaccagcggtgccccagaccttccaggtggcccatttgcatctcccacaggcagcggcaagagcaccaaagtcccggctgcatatgcagctcagggttataaggtgctagtgctcaacccctctgtcgctgcaacattgggctttggtgcctacatgtctaaggcccagggatcgatcctaacatcaggaccggggtgaggacaattaccactggcagccccatcacgtactccacctacggtaagttccttgccgacggcgggtgctcagggggcgcttatgacataataatctgtgacgagtgccatccacggatgccacatccatcttgggcatcggcactgtccttgaccaagcagagaccgcgggggcgagactggttgtgctcgccaccgctacccctccgggctctatcactgtgccacatcccaacatgaggaggttgctctgtccaccaccggagagatccctttttacggcaaggccatcccccttgatgtaatcaagggggggagacatctcattttctgtcactcaaagaagaagtgtgacgagcttgccgcaaagctggtcgcatgggcgtcaatgccgtggcctactaccgcggtctcgacgtatctgtcatcccgaccggcggcgatgttgtcgtcgtggcaactgatgctctcatgaccggctttactggcgacttcgactcggtgatgactgcaacacgtgcgtcacccagacagtcgatttcagccttgaccctaccttcaccattgagacaaccacgcttccccaggatgctgtctcccgcactcaacgtcggggcaggactggcagggggaggcaaggcacctacgatttgtggcaccgggggagcgcccctctggcatgttcgactcgtctgtcctctgtgagtgctatgacgcgggctgtgcttggtacgagctcacgcctgccgagaccacagttaggctacgagcgtaatgaacaccccggggcttcccgtgtgtcaagaccatcttgaattttgggagggcgtctttacaggcctcacccatatagatgcccacttcctatcccagacaaaacagagcggggagaatcttccttacctggtagcgtacaagccaccgtgtgcgctagggcgcaagccccccccccatcgtgggaccagatgtggaagtgtttggtccgcctcaaacccaccctccacgggccaacacccctgctatacagactgggtgctgttcaaatgaagtcaccctgacgcacccagtcaccaaatacatcatgacatgtatgtcggctga

SEQ ID NO: 461 - DNA, 4868 bp, Hepatitis C virus
tcgcccacaggacgtcaagttcccgggcggcggccagatcgttggtggagtttacttgttgccgcgcaggggccctagattgggtgtgcgcgcgacgaggaagacttccgagcggtcgcaacctcgagtagacgtcagcctatccccaaggcgcgtcggtccgagggcaggacctgggctcagcccgggtacccttggcccctctatggcaatgagggttgcggatgggcgggatggctcctgtccccccgtggtctcggcctagctggggccccacagacccccggcgtaggtcgcgcaatttgggcaaggtcatcgataccctcacgtgcggcttcgccgacctcatggggtacataccgctcgtcggcgcccctcttgggggcgctgccaggccctggcgcatggagtccgggttctggaagacggcgtgaattatgcaacagggaacctccccggttgctctttctctatcttccttctggccttgctctcttgcctgactgtgcccgcttcagcctacaagtgcgcaactccacggggctttaccatgtcaccaatgattgccctaattcgagtattgtgtacgaggcggccgatgctatcctgcacaccccggggtgtgtcccttgcgttcgtaagggtaacacctcggtgtgttggtggcggtaacccctacggtggccaccagggacggcaaactccccacaacgcagcttcgacgtcatatcgatctgctcgtcgggagtgccaccctctgttcggccctctatgtgggggacctgtgcggtctgtctttcttgttggccaactgtttaccctctctcccagacgccactggacaacgcaaggctgcaattgttccatctatcccggccatataacgggccaccgcatggcatgggatatgatgatgaactggtcccctacacggcgttggtaatggcacagctgctccggatcccacaagccatcatggacatgatcgctggtgctcactggggagtcctggcgggcatagcgtatttctctatggtggggaactgggcgaaggtcctgtagtgctgctgctatttgccggcgtcgacgcaaaaacttatgtcaccgggggagctgctgcccacaccacgtccggacttgctgggctcttcttacaaggccccaagcagaacgtccacttgatcaacaccaacggcagtggcacatcaatagtacggccttgaactgcaacgctagccttgacaccggctggatagcagggcttttctattacaacaaattcaactcttcaggttgtcccgagaggttggccagctgccgactcctactgattttgaccagggctggggccctatcagtcatgccaacggaagcggccccgaccaacgcccctactgctggcactaccccccaaaaccttgcggcattgtgcccgcgaagagtgtgtgtggcccggtatattgcttcctcccagccctgtggtggtgggaacgaccgacaggtcgggcgaacctacctacaactggggtgaaaatgatacggacgtcttcgtccttaacaacatcaggccaccgctgggtaattggtttggttgacctggatgaactcaaccggattcaccaaagtgtgcggggcgcctccttgtgacatcgggggggcgggcaacaacaccttgcactgccccactgattgtttccgcaagcatccggaagccacgtactctcggtgcggctccgtccctggatcacgcccaggtgcctggtccactacccatacaggctttggcattatccctgtaccatcaactacaccatatttaaagtcaggatgtacgtgggagggatcgagcacaggttggaagcgcctgcaactggacgcggggcgagcgttgcgatctggaagacagggacaggtccgagcttagcccgttgctgctgtctaccacacagtggcaagtccttccgtgttccttcacggccatgccagccttgtccaccggcctctccacctccaccagaacattgtggatgtgcagtatttgtacggggtggggtcaagcattgcgtcctgggccattaagtgggagtacgtcgttctcctgttccttttgcttgcagacgcgcgcgtctgtcctgcttgtggatgatgttactcatatcccaagcggaggcggctttggagaaccttgtaatactcaatgcagcatccctggccgggacgcacggtcttgtatccttcctcgtgttcttctgctttgcatggtatctgaaagcaggtgggtgcccggagcggcttacgccttctacgggatgtggcctctcctcctgctcctgctggcgttgccccagcgggcatacgcgctggacacggaggtggccgcgtcgtgtggcggcgttgtcttgtcgggttaatggcgctgactttatcaccacactacaagcgctatatcagctggtgcttatggtggcttcagtattttctgaccagagcggaagcgcagctgcacgtgtgggttccccccctcaacgtccgggggggggtgacgctgtcatcttactcatgtgtgttgtacacccgactctggtattcgacatcaccaaaatgctgctggccgtctatggacccctctggattcttcaagccagtttgcttgaggtaccctacttgtgcgcgtccaaggccttctccggatctgcgcgctagcgcggaagatggtcggaggccattacgtgcaaatggccatcatcaagttaggggcgcttactggcacctatatttataatcatctcacccctcttcaggactggcgcacaacggcctgcgagacctggccgcggctgtagagccagtcgttttctcccaaatggagaccaagctcatcacgtggggggcagacactgccgcgtgcggtgacattgtcgacggcttacccgttccgcccgtaggggccgggagatactgcttgggccggccgatggaatggtctccaaggggtggaggttgctggcgcccatcacggcgtacgcccagcagacaaggggcctcctagggtgtataatcaccagcctaactggcgggacaaaaaccaagtggaaggtgaggtccagattgtgtcgactgctgcccaaactttcctggcaacgtgcatcaatggggtatgctggactgtctaccacggggccggaacgaggaccatcgcatccccaagggtcctgttatccagatgtataccaatgtagaccaagaccttgtgggctggcccgctcctcaaggtgcccgctcattgacaccctgcacctgcggctcctcggacctttacttggtcacgaggcacgccgatgtcttcccgtgcgccggcggggtgatagcaggggcagcctgctctcgccccggcctatttcctacttgaaaggctcctcgggaggtccgctgttgtgccccgcgggacacgccgtgggcatatttagggcgcggtgtgtacccgtggagtggctaaggcggtggactttatccccgtggagagcctggaaacaaccatgaggtccccggtgtttacggacaactcctccccaccagcggtgccccagaccttccaggtggcccatttgcatctcccacaggcagcggcaagagcaccaaagtcccggctgcatatgcagctcagggttataaggtgctagtgctcaacccctctgtcgctgcaacattgggctttggtgcctacatgtctaaggcccagggatcgatcctaacatcaggaccggggtgaggacaattaccactggcagccccatcacgtactccacctacggtaagttccttgccgacggcgggtgctcagggggcgcttatgacataataatctgtgacgagtgccatccacggatgccacatccatcttgggcatcggcactgtccttgaccaagcagagaccgcgggggcgagactggttgtgctcgccaccgctacccctccgggctctatcactgtgccacatcctaacatgaggaggttgctctgtccaccaccggagagatccctttttacggcaaggccatcccccttgatgtaatcaagggggggagacatctcattttctgtcactcaaagaagaagtgtgacgagcttgccgcaaagctggtcgcatgggcgtcaatgccgtggcctactaccgcggtctcgacgtatctgtcatcccgaccggcggcgatgttgtcgtcgtggcaactgatgctctcatgaccggctttactggcgacttcgactcggtgatgactgcaacacgtgcgtcacccagacagtcgatttcagccttgaccctaccttcaccattgagacaaccacgcttccccaggatgctgtctcccgcactcaacgtcggggcaggactggcagggggaggcaaggcacctacgatttgtggcaccgggggagcgcccctctggcatgttcgactcgtctgtcctctgtgagtgctatgacgcgggctgtgcttggtacgagctcacgcctgccgagaccacagttaggctacgagcgtaatgaacaccccggggcttcccgtgtgtcaagaccatcttgaattttgggagggcgtctttacaggcctcacccatatagatgcccacttcctatcccagacaaaacagagcggggagaatcttccttacctggtagcgtacaagccaccgtgtgcgctagggcgcaagcccccccccatcgtgggaccagatgtggaagtgtttggtccgcctcaaacccaccctccacgggccaacacccctgctatacagactgggtgctgttcagatgaagtcaccctgacgcacccagtcaccaaatacatcatgacatgtatgtcggctga

SEQ ID NO: 462 - DNA, 4869 bp, Hepatitis C virus
tcgcccacaggacgtcaagttcccgggcggcggccagatcgttggtggagtttacttgttgccgcgcaggggccctagattgggtgtgcgcgcgacgaggaagacttccgagcggtcgcaacctcgagtagacgtcagcctatccccaaggcgcgtcggtccgagggcaggacctgggctcagcccgggtacccttggcccctctatggcaatgagggttgcggatgggcgggatggctcctgtccccccgtggtctcggcctagctggggccccacagacccccggcgtaggtcgcgcaatttgggcaaggtcatcgataccctcacgtgcggcttcgccgacctcatggggtacataccgctcgtcggcgcccctcttgggggcgctgccaggccctggcgcatggagtccgggttctggaagacggcgtgaattatgcaacagggaacctccccggttgctctttctctatcttccttctggccttgctctcttgcctgactgtgcccgcttcagcctacaagtgcgcaactccacggggctttaccatgtcaccaatgattgccctaattcgagtattgtgtacgaggcggccgatgctatcctgcacaccccggggtgtgtcccttgcgttcgtaagggtaacacctcggtgtgttggtggcggtaacccctacggtggccaccagggacggcaaactccccacaacgcagcttcgacgtcatatcgatctgctcgtcgggagtgccaccctctgttcggccctctatgtgggggacctgtgcggtctgtctttcttgttggccaactgtttaccctctctcccagacgccactggacaacgcaaggctgcaattgttccatctatcccggccatataacgggccaccgcatggcatgggatatgatgatgaactggtcccctacacggcgttggtaatggcacagctgctccggatcccacaagccatcatggacatgatcgctggtgctcactggggagtcctggcgggcatagcgtatttctctatggtggggaactgggcgaaggtcctgtagtgctgctgctatttgccggcgtcgacgcaaaaacttatgtcaccgggggagctgctgcccacaccacgtccggacttgctgggctcttcttacaaggccccaagcagaacgtccacttgatcaacaccaacggcagtggcacatcaatagtacggccttgaactgcaacgctagccttgacaccggctggatagcagggcttttctattacaacaaattcaactcttcaggttgtcccgagaggttggccagctgccgactcctactgattttgaccagggctggggccctatcagtcatgccaacggaagcggccccgaccaacgcccctactgctggcactaccccccaaaaccttgcggcattgtgcccgcgaggagtgtgtgtggcccggtatattgcttcctcccagccctgtggtggtgggaacgaccgacgggtcgggcgtacctacctacaactggggtgaaaatgatacggacgtcttcgtccttaacaacatcaggccaccgctgggtaattggtttggttgacctggatgaactcaactggattcaccaaagtgtgcggggcgcctccttgtgacatcgggggggcgggcaacaacaccttgcactgccccactgattgtttccgcaagcatccggaagccacgtactctcggtgcggctccgtccctggatcacgcccaggtgcctggtccactacccatacaggctttggcattatccctgtaccatcaactacaccatatttaaagtcaagatgtacgtgggagggatcgagcacaggttggaagcgcctgcaactggacgcggggcgagcgttgcgatctggaagacagggacaggtccgagcttagcccgttgctgctgtctaccacacagtggcaagtccttccgtgttccttcacggccatgccagccttgtccaccggcctctccacctccaccagaacattgtggatgtgcagtatttgtacggggtggggtcaagcattgcgtcctgggccattaagtgggagtacgtcgttctcctgttccttttgcttgcagacgcgcgcgtctgtcctgcttgtggatgatgttactcatatcccaagcggaggcggctttggagaaccttgtaatactcaatgcagcatccctggccgggacgcacggtcttgtatccttcctcgtgttcttctgctttgcatggtatctgaaagcaggtgggtgcccggagcggcttacgccttctacgggatgtggcctctcctcctgctcctgctggcgttgccccagcgggcatacgcgctggacacggaggtggccgcgtcgtgtggcggcgttgtcttgtcgggttaatggcgctgactttatcaccacactacaagcgctatatcagctggtgcttatggtggcttcagtattttctgaccagagcggaagcgcagctgcacgtgtgggttccccccctcaacgtccgggggggggtgacgctgtcatcttactcatgtgtgttgtacacccgactctggtattcgacatcaccaaaatgctgctggccgtctatggacccctctggattcttcaagccagtttgcttgaggtaccctacttgtgcgcgtccaaggccttctccggatctgcgcgctagcgcggaagatggtcggaggccattacgtgcaaatggccatcatcaagttaggggcgcttactggcacctatatttataatcatctcacccctcttcaggactggcgcacaacggcctgcgagacctggccgcggctgtagagccagtcgtcttctcccaaatggagaccaagctcatcacgtggggggcagacactgccgcgtgcggtgacattgtcgacggcttacccgttccgcccgtaggggccgggagatactgcttgggccggccgatggaatggtctccaaggggtggaggttgctggcgcccatcacggcgtacgcccagcagacaaggggcctcctagggtgtataatcaccagcctaactggcgggacaaaaaccaagtggaaggtgaggtccagattgtgtcgactgctgcccaaactttcctggcaacgtgcatcaatggggtatgctggactgtctaccacggggccggaacgaggaccatcgcatccccaagggtcctgttatccagatgtataccaatgtagaccaagaccttgtgggctggcccgctcctcaaggtgcccgctcattgacaccctgcacctgcggctcctcggacctttacttggtcacgaggcacgccgatgtcttcccgtgcgccggcggggtgatagcaggggcagcctgctctcgccccggcctatttcctacttgaaaggctcctcgggaggtccgctgttgtgccccgcgggacacgccgtgggcatatttagggcgcggtgtgtacccgtggagtggctaaggcggtggactttatccccgtggagagcctggaaacaaccatgaggtccccggtgtttacggacaactcctccccaccagcggtgccccagaccttccaggtggcccatttgcatctcccacaggcagcggcaagagcaccaaagtcccggctgcatatgcagctcagggttataaggtgctagtgctcaacccctctgtcgctgcaacattgggctttggtgcctacatgtctaaggcccagggatcgatcctaacatcaggaccggggtgaggacaattaccactggcagccccatcacgtactccacctacggtaagttccttgccgacggcgggtgctcagggggcgcttatgacataataatctgtgacgagtgccatccacggatgccacatccatcttgggcatcggcactgtccttgaccaagcagagaccgcgggggcgagactggttgtgctcgccaccgctacccctccgggctctatcactgtgccacatcccaacatgaggaggttgctctgtccaccaccggagagatccctttttacggcaaggccatcccccttgatgtaatcaagggggggagacatctcattttctgtcactcaaagaagaagtgtgacgagcttgccgcaaagctggtcgcatgggcgtcaatgccgtggcctactaccgcggtctcgacgtatctgtcatcccgaccggcggcgatgttgtcgtcgtggcaactgatgctctcatgaccggctttactggcgacttcgactcggtgatgactgcaacacgtgcgtcacccagacagtcgatttcagccttgaccctaccttcaccattgagacaaccacgcttccccaggatgctgtctcccgcactcaacgtcggggcaggactggcagggggaggcaaggcacctacgatttgtggcaccgggggagcgcccctctggcatgttcgactcgtctgtcctctgtgagtgctatgacgcgggctgtgcttggtacgagctcacgcctgccgagaccacagttaggctacgagcgtaatgaacaccccggggcttcccgtgtgtcaagaccatcttgaattttgggagggcgtctttacaggcctcacccatatagatgcccacttcctatcccagacaaaacagagcggggagaatcttccttacctggtagcgtacaagccaccgtgtgcgctagggcgcaagccccccccccatcgtgggaccagatgtggaagtgtttggtccgcctcaaacccaccctccacgggccaacacccctgctatacagactgggtgctgttcaaatgaagtcaccctgacgcacccagtcaccaaatacatcatgacatgtatgtcggctga

SEQ ID NO: 463 - DNA, 4869 bp, Hepatitis C virus; identical to SEQ ID NO: 458

SEQ ID NO: 464 - DNA, 4869 bp, Hepatitis C virus
tcgcccacaggacgtcaagttcccgggcggcggccagatcgttggtggagtttacttgttgccgcgcaggggccctagattgggtgtgcgcgcgacgaggaagacttccgagcggtcgcaacctcgagtagacgtcagcctatccccaaggcgcgtcggtccgagggcaggacctgggctcagcccgggtacccttggcccctctatggcaatgagggttgcggatgggcgggatggctcctgtccccccgtggtctcggcctagctggggccccacagacccccggcgtaggtcgcgcaatttgggcaaggtcatcgataccctcacgtgcggcttcgccgacctcatggggtacataccgctcgtcggcgcccctcttgggggcgctgccaggccctggcgcatggagtccgggttctggaagacggcgtgaattatgcaacagggaacctccccggttgctctttctctatcttccttctggccttgctctcttgcctgactgtgcccgcttcagcctacaagtgcgcaactccacggggctttaccatgtcaccaatgattgccctaattcgagtattgtgtacgaggcggccgatgctatcctgcacaccccggggtgtgtcccttgcgttcgtaagggtaacacctcggtgtgttggtggcggtaacccctacggtggccaccagggacggcaaactccccacaacgcagcttcgacgtcatatcgatctgctcgtcgggagtgccaccctctgttcggccctctatgtgggggacctgtgcggtctgtctttcttgttggccaactgtttaccctctctcccagacgccactggacaacgcaaggctgcaattgttccatctatcccggccatataacgggccaccgcatggcatgggatatgatgatgaactggtcccctacacggcgttggtaatggcacagctgctccggatcccacaagccatcatggacatgatcgctggtgctcactggggagtcctggcgggcatagcgtatttctctatggtggggaactgggcgaaggtcctgtagtgctgctgctatttgccggcgtcgacgcaaaaacttatgtcaccgggggagctgctgcccacaccacgtccggacttgctgggctcttcttacaaggccccaagcagaacgtccacttgatcaacaccaacggcagtggcacatcaatagtacggccttgaactgcaacgctagccttgacaccggctggatagcagggcttttctattacaacaaattcaactcttcaggttgtcccgagaggttggccagctgccgactcctactgattttgaccagggctggggccctatcagtcatgccaacggaagcggccccgaccaacgcccctactgctggcactaccccccaaaaccttgcggcattgtgcccgcgaagagtgtgtgtggcccggtatattgcttcctcccagccctgtggtggtgggaacgaccgacaggtcgggcgaacctacctacaactggggtgaaaatgatacggacgtcttcgtccttaacaacatcaggccaccgctgggtaattggtttggttgacctggatgaactcaactggattcaccaaagtgtgcggggcgcctccttgtgacatcgggggggcgggcaacaacaccttgcactgccccactgattgtttccgcaagcatccggaagccacgtactctcggtgcggctccgtccctggatcacgcccaggtgcctggtccactacccatacaggctttggcattatccctgtaccatcaactacaccatatttaaagtcaggatgtacgtgggagggatcgagcacaggttggaagcgcctgcaactggacgcggggcgagcgttgcgatctggaagacagggacaggtccgagcttagcccgttgctgctgtctaccacacagtggcaagtccttccgtgttccttcacggccatgccagccttgtccaccggcctctccacctccaccagaacattgtggatgtgcagtatttgtacggggtggggtcaagcattgcgtcctgggccattaagtgggagtacgtcgttctcctgttccttttgcttgcagacgcgcgcgtctgtcctgcttgtggatgatgttactcatatcccaagcggaggcggctttggagaaccttgtaatactcaatgcagcatccctggccgggacgcacggtcttgtatccttcctcgtgttcttctgctttgcatggtatttgaaagcaggtgggtgcccggagcggcttacgccttctacgggatgtggcctctcctcctgctcctgctggcgttgccccagcgggcatacgcgctggacacggaggtggccgcgtcgtgtggcggcgttgtcttgtcgggttaatggcgctgactttatcaccacactacaagcgctatatcagctggtgcttatggtggcttcagtattttctgaccagagcggaagcgcagctgcacgtgtgggttccccccctcaacgtccgggggggggtgacgctgtcatcttactcatgtgtgttgtacacccgactctggtattcgacatcaccaaaatgctgctggccgtctatggacccctctggattcttcaagccagtttgcttgaggtaccctacttgtgcgcgtccaaggccttctccggatctgcgcgctagcgcggaagatggtcggaggccattacgtgcaaatggccatcatcaagttaggggcgcttactggcacctatatttataatcatctcacccctcttcaggactggcgcacaacggcctgcgagacctggccgcggctgtagagccagtcgtcttctcccaaatggagaccaagctcatcacgtggggggcagacactgccgcgtgcggtgacattgtcgacggcttacccgttccgcccgtaggggccgggagatactgcttgggccggccgatggaatggtctccaaggggtggaggttgctggcgcccatcacggcgtacgcccagcagacaaggggcctcctagggtgtataatcaccagcctaactggcgggacaaaaaccaagtggaaggtgaggtccagattgtgtcgactgctgcccaaactttcctggcaacgtgcatcaatggggtatgctggactgtctaccacggggccggaacgaggaccatcgcatccccaagggtcctgttatccagatgtataccaatgtagaccaagaccttgtgggctggcccgctcctcaaggtgcccgctcattgacaccctgcacctgcggctcctcggacctttacttggtcacgaggcacgccgatgtcttcccgtgcgccggcggggtgatagcaggggcagcctgctctcgccccggcctatttcctacttgaaaggctcctcgggaggtccgctgttgtgccccgcgggacacgccgtgggcatatttagggcgcggtgtgtacccgtggagtggctaaggcggtggactttatccccgtggagagcctggaaacaaccatgaggtccccggtgtttacggacaactcctccccaccagcggtgccccagaccttccaggtggcccatttgcatctcccacaggcagcggcaagagcaccaaagtcccggctgcatatgcagctcagggttataaggtgctagtgctcaacccctctgtcgctgcaacattgggctttggtgcctacatgtctaaggcccagggatcgatcctaacatcaggaccggggtgaggacaattaccactggcagccccatcacgtactccacctacggtaagttccttgccgacggcgggtgctcagggggcgcttatgacataataatctgtgacgagtgccatccacggatgccacatccatcttgggcatcggcactgtccttgaccaagcagagaccgcgggggcgagactggttgtgctcgccaccgctacccctccgggctctatcactgtgccacatcccaacatgaggaggttgctctgtccaccaccggagagatccctttttacggcaaggccatcccccttgatgtaatcaagggggggagacatctcattttctgtcactcaaagaagaagtgtgacgagcttgccgcaaagctggtcgcatgggcgtcaatgccgtggcctactaccgcggtctcgacgtatctgtcatcccgaccggcggcgatgttgtcgtcgtggcaactgatgctctcatgaccggctttactggcgacttcgactcggtgatgactgcaacacgtgcgtcacccagacagtcgatttcagccttgaccctaccttcaccattgagacgaccacgcttccccaggatgctgtctcccgcactcaacgtcggggcaggactggcagggggaggcaaggcacctacgatttgtggcaccgggggagcgcccctctggcatgttcgactcgtctgtcctctgtgagtgctatgacgcgggctgtgcttggtacgagctcacgcctgccgagaccacagttaggctacgagcgtaatgaacaccccggggcttcctgtgtgtcaagaccatcttgaattttgggagggcgtctttacaggcctcacccatatagatgcccacttcctatcccagacaaaacagagcggggagaatcttccttacctggtagcgtacaagccaccgtgtgcgctagggcgcaagccccccccccatcgtgggaccagatgtggaagtgtttggtccgcctcaaacccaccctccacgggccaacacccctgctatacagactgggtgctgttcaaatgaagtcaccctgacgcacccagtcaccaaatacatcatgacatgtatgtcggctga

SEQ ID NO: 465 - DNA, 4869 bp, Hepatitis C virus
tcgcccacaggacgtcaagttcccgggcggcggccagatcgttggtggagtttacttgttgccgcgcaggggccctagattgggtgtgcgcgcgacgaggaagacttccgagcggtcgcaacctcgagtagacgtcagcctatccccaaggcgcgtcggtccgagggcaggacctgggctcagcccgggtacccttggcccctctatggcaatgagggttgcggatgggcgggatggctcctgtccccccgtggtctcggcctagctggggccccacagacccccggcgtaggtcgcgcaatttgggcaaggtcatcgataccctcacgtgcggcttcgccgacctcatggggtacataccgctcgtcggcgcccctcttgggggcgctgccaggccctggcgcatggagtccgggttctggaagacggcgtgaattatgcaacagggaacctccccggttgctctttctctatcttccttctggccttgctctcttgcctgactgtgcccgcttcagcctacaagtgcgcaactccacggggctttaccatgtcaccaatgattgccctaattcgagtattgtgtacgaggcggccgatgctatcctgcacaccccggggtgtgtcccttgcgttcgtaagggtaacacctcggtgtgttggtggcggtaacccctacggtggccaccagggacggcaaactccccacaacgcagcttcgacgtcatatcgatctgctcgtcgggagtgccaccctctgttcggccctctatgtgggggacctgtgcggtctgtctttcttgttggccaactgtttaccctctctcccagacgccactggacaacgcaaggctgcaattgttccatctatcccggccatataacgggccaccgcatggcatgggatatgatgatgaactggtcccctacacggcgttggtaatggcacagctgctccggatcccacaagccatcatggacatgatcgctggtgctcactggggagtcctggcgggcatagcgtatttctctatggtggggaactgggcgaaggtcctgtagtgctgctgctatttgccggcgtcgacgcaaaaacttatgtcaccgggggagctgctgcccacaccacgtccggacttgctgggctcttcttacaaggccccaagcagaacgtccacttgatcaacaccaacggcagtggcacatcaatagtacggccttgaactgcaacgctagccttgacaccggctggatagcagggcttttctattacaacaaattcaactcttcaggttgtcccgagaggttggccagctgccgactcctactgattttgaccagggctggggccctatcagtcatgccaacggaagcggccccgaccaacgcccctactgctggcactaccccccaaaaccttgcggcattgtgcccgcgaagagtgtgtgtggcccggtatattgcttcctcccagccctgtggtggtgggaacgaccgacaggtcgggcgaacctacctacaactggggtgaaaatgatacggacgtcttcgtccttaacaacatcaggccaccgctgggtaattggtttggttgacctggatgaactcaactggattcaccaaagtgtgcggggcgcctccttgtgacatcgggggggcgggcaacaacaccttgcactgccccactgattgtttccgcaagcatccggaagccacgtactctcggtgcggctccgtccctggatcacgcccaggtgcctggtccactacccatacaggctttggcattatccctgtaccatcaactacaccatatttaaagtcaggatgtacgtgggagggatcgagcacaggttggaagcgcctgcaactggacgcggggcgagcgttgcgatctggaagacagggacaggtccgagcttagcccgttgctgctgtctaccacacagtggcaagtccttccgtgttccttcacggccatgccagccttgtccaccggcctctccacctccaccagaacattgtggatgtgcagtatttgtacggggtggggtcaagcattgcgtcctgggccattaagtgggagtacgtcgttctcctgttccttttgcttgcagacgcgcgcgtctgtcctgcttgtggatgatgttactcatatcccaagcggaggcggctttggagaaccttgtaatactcaatgcagcatccctggccgggacgcacggtcttgtatccttcctcgtgttcttctgctttgcatggtatctgaaagcaggtgggtgcccggagcggcttacgccttctacgggatgtggcctctcctcctgctcctgctggcgttgccccagcgggcatacgcgctggacacggaggtggccgcgtcgtgtggcggcgttgtcttgtcgggttaatggcgctgactttatcaccacactacaagcgctatatcagctggtgcttatggtggcttcagtattttctgaccagagcggaagcgcagctgcacgtgtgggttccccccctcaacgtccgggggggggtgacgctgtcatcttactcatgtgtgttgtacacccgactctggtattcgacatcaccaaaatgctgctggccgtctatggacccctctggattcttcaagccagtttgcttgaggtaccctacttgtgcgcgtccaaggccttctccggatctgcgcgctagcgcggaagatggtcggaggccattacgtgcaaatggccatcatcaagttaggggcgcttactggcacctatatttataatcatctcacccctcttcaggactggcgcacaacggcctgcgagacctggccgcggctgtagagccagtcgtcttctcccaaatggagaccaagctcatcacgtggggggcagacactgccgcgtgcggtgacattgtcgacggcttacccgttccgcccgtaggggccgggagatactgcttgggccggccgatggaatggtctccaaggggtggaggttgctggcgcccatcacggcgtacgcccagcagacaaggggcctcctagggtgtataatcaccagcctaactggcgggacaaaaaccaagtggaaggtgaggtccagattgtgtcgactgctgcccaaactttcctggcaacgtgcatcaatggggtatgctggactgtctaccacggggccggaacgaggaccatcgcatccccaagggtcctgttatccagatgtataccaatgtagaccaagaccttgtgggctggcccgctcctcaaggtgcccgctcattgacaccctgcacctgcggctcctcggacctttacttggtcacgaggcacgccgatgtcttcccgtgcgccggcggggtgatagcaggggcagcctgctctcgccccggcctatttcctacttgaaaggctcctcgggaggtccgctgttgtgccccgcgggacacgccgtgggcatatttagggcgcggtgtgtacccgtggagtggctaaggcggtggactttatccccgtggagagcctggaaacaaccatgaggtccccggtgtttacggacaactcctccccaccagcggtgccccagaccttccaggtggcccatttgcatctcccacaggcagcggcaagagcaccaaagtcccggctgcatatgcagctcagggttataaggtgctagtgctcaacccctctgtcgctgcaacattgggctttggtgcctacatgtctaaggcccagggatcgatcctaacatcaggaccggggtgaggacaattaccactggcagccccatcacgtactccacctacggtaagttccttgccgacggcgggtgctcagggggcgcttatgacataataatctgtgacgagtgccatccacggatgccacatccatcttgggcatcggcactgtccttgaccaagcagagaccgcgggggcgagactggttgtgctcgccaccgctacccctccgggctctatcactgtgccacatcccaacatgaggaggttgctctgtccaccaccggagagatccctttttacggcaaggccatcccccttgatgtaatcaagggggggagacatctcattttctgtcactcaaagaagaagtgtgacgagcttgccgcaaagctggtcgcatgggcgtcaatgccgtggcctactaccgcggtctcgacgtatctgtcatcccgaccggcggcgatgttgtcgtcgtggcaactgatgctctcatgaccggctttactggcgacttcgactcggtgatgactgcaacacgtgcgtcacccagacagtcgatttcagccttgaccctaccttcaccattgagacgaccacgcttccccaggatgctgtctcccgcactcaacgtcggggcaggactggcagggggaggcaaggcacctacgatttgtggcaccgggggagcgcccctctggcatgttcgactcgtctgtcctctgtgagtgctatgacgcgggctgtgcttggtacgagctcacgcctgccgagaccacagttaggctacgagcgtaatgaacaccccggggcttcctgtgtgtcaagaccatcttgaattttgggagggcgtctttacaggcctcacccatatagatgcccacttcctatcccagacaaaacagagcggggagaatcttccttacctggtagcgtacaagccaccgtgtgcgctagggcgcaagccccccccccatcgtgggaccagatgtggaagtgtttggtccgcctcaaacccaccctccacgggccaacacccctgctatacagactgggtgctgttcaaatgaagtcaccctgacgcacccagtcaccaaatacatcatgacatgtatgtcggctga

SEQ ID NO: 466 - DNA, 4869 bp, Hepatitis C virus
tcgcccacaggacgtcaagttcccgggcggcggccagatcgttggtggagtttacttgttgccgcgcaggggccctagattgggtgtgcgcgcgacgaggaagacttccgagcggtcgcaacctcgagtagacgtcagcctatccccaaggcgcgtcggtccgagggcaggacctgggctcagcccgggtacccttggcccctctatggcaatgagggttgcggatgggcgggatggctcctgtccccccgtggtctcggcctagctggggccccacagacccccggcgtaggtcgcgcaatttgggcaaggtcatcgataccctcacgtgcggcttcgccgacctcatggggtacataccgctcgtcggcgcccctcttgggggcgctgccaggccctggcgcatggagtccgggttctggaagacggcgtgaattatgcaacagggaacctccccggttgctctttctctatcttccttctggccttgctctcttgcctgactgtgcccgcttcagcctacaagtgcgcaactccacggggctttaccatgtcaccaatgattgccctaattcgagtattgtgtacgaggcggccgatgctatcctgcacaccccggggtgtgtcccttgcgttcgtaagggtaacacctcggtgtgttggtggcggtaacccctacggtggccaccagggacggcaaactccccacaacgcagcttcgacgtcatatcgatctgctcgtcgggagtgccaccctctgttcggccctctatgtgggggacctgtgcggtctgtctttcttgttggccaactgtttaccctctctcccagacgccactggacaacgcaaggctgcaattgttccatctatcccggccatataacgggccaccgcatggcatgggatatgatgatgaactggtcccctacacggcgttggtaatggcacagctgctccggatcccacaagccatcatggacatgatcgctggtgctcactggggagtcctggcgggcatagcgtatttctctatggtggggaactgggcgaaggtcctgtagtgctgctgctatttgccggcgtcgacgcaaaaacttatgtcaccgggggagctgctgcccacaccacgtccggacttgctgggctcttcttacaaggccccaagcagaacgtccacttgatcaacaccaacggcagtggcacatcaatagtacggccttgaactgcaacgctagccttgacaccggctggatagcagggcttttctattacaacaaattcaactcttcaggttgtcccgagaggttggccagctgccgactcctactgattttgaccagggctggggccctatcagtcatgccaacggaagcggccccgaccaacgcccctactgctggcactaccccccaaaaccttgcggcattgtgcccgcgaagagtgtgtgtggcccggtatattgcttcctcccagccctgtggtggtgggaacgaccgacaggtcgggcgaacctacctacaactggggtgaaaatgatacggacgtcttcgtccttaacaacatcaggccaccgctgggtaattggtttggttgacctggatgaactcaaccggattcaccaaagtgtgcggggcgcctccttgtgacatcgggggggcgggcaacaacaccttgcactgccccactgattgtttccgcaagcatccggaagccacgtactctcggtgcggctccgtccctggatcacgcccaggtgcctggtccactacccatacaggctttggcattatccctgtaccatcaactacaccatatttaaagtcaggatgtacgtgggagggatcgagcacaggttggaagcgcctgcaactggacgcggggcgagcgttgcgatctggaagacagggacaggtccgagcttagcccgttgctgctgtctaccacacagtggcaagtccttccgtgttccttcacggccatgccagccttgtccaccggcctctccacctccaccagaacattgtggatgtgcagtatttgtacggggtggggtcaagcattgcgtcctgggccattaagtgggagtacgtcgttctcctgttccttttgcttgcagacgcgcgcgtctgtcctgcttgtggatgatgttactcatatcccaagcggaggcggctttggagaaccttgtaatactcaatgcagcatccctggccgggacgcacggtcttgtatccttcctcgtgttcttctgctttgcatggtatctgaaagcaggtgggtgcccggagcggcttacgccttctacgggatgtggcctctcctcctgctcctgctggcgttgccccagcgggcatacgcgctggacacggaggtggccgcgtcgtgtggcggcgttgtcttgtcgggttaatggcgctgactttatcaccacactacaagcgctatatcagctggtgcttatggtggcttcagtattttctgaccagagcggaagcgcagctgcacgtgtgggttccccccctcaacgtccgggggggggtgacgctgtcatcttactcatgtgtgttgtacacccgactctggtattcgacatcaccaaaatgctgctggccgtctatggacccctctggattcttcaagccagtttgcttgaggtaccctacttgtgcgcgtccaaggccttctccggatctgcgcgctagcgcggaagatggtcggaggccattacgtgcaaatggccatcatcaagttaggggcgcttactggcacctatatttataatcatctcacccctcttcaggactggcgcacaacggcctgcgagacctggccgcggctgtagagccagtcgttttctcccaaatggagaccaagctcatcacgtggggggcagacactgccgcgtgcggtgacattgtcgacggcttacccgttccgcccgtaggggccgggagatactgcttgggccggccgatggaatggtctccaaggggtggaggttgctggcgcccatcacggcgtacgcccagcagacaaggggcctcctagggtgtataatcaccagcctaactggcgggacaaaaaccaagtggaaggtgaggtccagattgtgtcgactgctgcccaaactttcctggcaacgtgcatcaatggggtatgctggactgtctaccacggggccggaacgaggaccatcgcatccccaagggtcctgttatccagatgtataccaatgtagaccaagaccttgtgggctggcccgctcctcaaggtgcccgctcattgacaccctgcacctgcggctcctcggacctttacttggtcacgaggcacgccgatgtcttcccgtgcgccggcggggtgatagcaggggcagcctgctctcgccccggcctatttcctacttgaaaggctcctcgggaggtccgctgttgtgccccgcgggacacgccgtgggcatatttagggcgcggtgtgtacccgtggagtggctaaggcggtggactttatccccgtggagagcctggaaacaaccatgaggtccccggtgtttacggacaactcctccccaccagcggtgccccagaccttccaggtggcccatttgcatctcccacaggcagcggcaagagcaccaaagtcccggctgcatatgcagctcagggttataaggtgctagtgctcaacccctctgtcgctgcaacattgggctttggtgcctacatgtctaaggcccagggatcgatcctaacatcaggaccggggtgaggacaattaccactggcagccccatcacgtactccacctacggtaagttccttgccgacggcgggtgctcagggggcgcttatgacataataatctgtgacgagtgccatccacggacgccacatccatcttgggcatcggcactgtccttgaccaagcagagaccgcgggggcgagactggttgtgctcgccaccgctacccctccgggctctatcactgtgccacatcccaacatgaggaggttgctctgtccaccaccggagagatccctttttacggcaaggccatcccccttgatgtaatcaagggggggagacatctcattttctgtcactcaaagaagaagtgtgacgagcttgccgcaaagctggtcgcatgggcgtcaatgccgtggcctactaccgcggtctcgacgtatctgtcatcccgaccggcggcgatgttgtcgtcgtggcaactgatgctctcatgaccggctttactggcgacttcgactcggtgatgactgcaacacgtgcgtcacccagacagtcgatttcagccttgaccctaccttcaccattgagacaaccacgcttccccaggatgctgtctcccgcactcaacgtcggggcaggactggcagggggaggcaaggcacctacgatttgtggcaccgggggagcgcccctctggcatgttcgactcgtctgtcctctgtgagtgctatgacgcgggctgtgcttggtacgagctcacgcctgccgagaccacagttaggctacgagcgtaatgaacaccccggggcttcccgtgtgtcaagaccatcttgaattttgggagggcgtctttacaggcctcacccatatagatgcccacttcctatcccagacaaaacagagcggggagaatcttccttacctggtagcgtacaagccaccgtgtgcgctagggcgcaagccccccccccatcgtgggaccagatgtggaagtgtttggtccgcctcaaacccaccctccacgggccaacacccctgctatacagactgggtgctgttcaaatgaagtcaccctgacgcacccagtcaccaaatacatcatgacatgtatgtcggctga

SEQ ID NO: 467 - DNA, 4675 bp, Hepatitis C virus
tcgcccacaggacgtcaagttcccgggcggcggccagatcgttggtggagtttacttgttgccgcgcaggggccctagattgggtgtgcgcgcgacgaggaagacttccgagcggtcgcaacctcgagtagacgtcagcctatccccaaggcgcgtcggtccgagggcaggacctgggctcagcccgggtacccttggcccctctatggcaatgagggttgcggatgggcgggatggctcctgtccccccgtggtctcggcctagctggggccccacagacccccggcgtaggtcgcgcaatttgggcaaggtcatcgataccctcacgtgcggcttcgccgacctcatggggtacataccgctcgtcggcgcccctcttgggggcgctgccaggccctggcgcatggagtccgggttctggaagacggcgtgaattatgcaacagggaacctccccggttgctctttctctatcttccttctggccttgctctcttgcctgactgtgcccgcttcagcctacaagtgcgcaactccacggggctttaccatgtcaccaatgattgccctaattcgagtattgtgtacgaggcggccgatgctatcctgcacaccccggggtgtgtcccttgcgttcgtaagggtaacacctcggtgtgttggtggcggtaacccctacggtggccaccagggacggcaaactccccacaacgcagcttcgacgtcatatcgatctgctcgtcgggagtgccaccctctgttcggccctctatgtgggggacctgtgcggtctgtctttcttgttggccaactgtttaccctctctcccagacgccactggacaacgcaaggctgcaattgttccatctatcccggccatataacgggccaccgcatggcatgggatatgatgatgaactggtcccctacacggcgttggtaatggcacagctgctccggatcccacaagccatcatggacatgatcgctggtgctcactggggagtcctggcgggcatagcgtatttctctatggtggggaactgggcgaaggtcctgtagtgctgctgctatttgccggcgtcgacgcaaaaacttatgtcaccgggggagctgctgcccacaccacgtccggacttgctgggctcttcttacaaggccccaagcagaacgtccacttgatcaacaccaacggcagtggcacatcaatagtacggccttgaactgcaacgctagccttgacaccggctggatagcagggcttttctattacaacaaattcaactcttcaggttgtcccgagaggttggccagctgccgactcctactgattttgaccagggctggggccctatcagtcatgccaacggaagcggccccgaccaacgcccctactgctggcactaccccccaaaaccttgtggcattgtgcccgcgaagagtgtgtgtggcccggtatattgcttcctcccagccctgtggtggtgggaacgaccgacagatcgggcgaacctacctacaactggggtgaaaatgatacggacgtcttcgtccttaacaacatcaggccaccgctgggtaattggtttggttgacctggatgaactcaaccggattcaccaaagtgtgcggggcgcctccttgtgacatcgggggggcgggcaacaacaccttgcactgccccactgattgtttccgcaagcatccggaagccacgtactctcggtgcggctccgtccctggatcacgcccaggtgcctggtccactacccatacaggctttggcattatccctgtaccatcaactacaccatatttaaagtcaggatgtacgtgggagggatcgagcacaggttggaagcgcctgcaactggacgcggggcgagcgttgcgatctggaagacagggacaggtccgagcttagcccgttgctgctgtctaccacacagtggcaagtccttccgtgttccttcacggccatgccagccttgtccaccggcctctccacctccaccagaacattgtggatgtgcagtatttgtacggggtggggtcaagcattgcgtcctgggccattaagtgggagtacgtcgttctcctgttccttttgcttgcagacgcgcgcgtctgtcctgcttgtggatgatgttactcatatcccaagcggaggcggctttggagaaccttgtaatactcaatgcagcatccctggccgggacgcacggtcttgtatccttcctcgtgttcttctgctttgcatggtatctgaaagcaggtgggtgcccggagcggcttacgccttctacgggatgtggcctctcctcctgctcctgctggcgttgccccagcgggcatacgcgctggacacggaggtggccgcgtcgtgtggcggcgttgtcttgtcgggttaatggcgctgactttatcaccacactacaagcgctatatcagctggtgcttatggtggcttcagtattttctgaccagagcggaagcgcagctgcacgtgtgggttccccccctcaacgtccgggggggggtgacgctgtcatcttactcatgtgtgttgtacacccgactctggtattcgacatcaccaaaatgctgctggccgtctatggacccctctggattcttcaagccagtttgcttgaggtaccctacttgtgcgcgtccaaggccttctccggatctgcgcgctagcgcggaagatggtcggaggccattacgtgcaaatggccatcatcaagttaggggcgcttactggcacctatatttataatcatctcacccctcttcaggactggcgcacaacggcctgcgagacctggccgcggctgtagagccagtcgttttctcccaaatggagaccaagctcatcacgtggggggcagacactgccgcgtgcggtgacattgtcgacggcttacccgttccgcccgtaggggccgggagatactgcttgggccggccgatggaatggtctccaaggggtggaggttgctggcgcccatcacggcgtacgcccagcagacaaggggcctcctagggtgtataatcaccagcctaactggcgggacaaaaaccaagtggaaggtgaggtccagattgtgtcgactgctgcccaaactttcctggcaacgtgcatcaatggggtatgctggactgtctaccacggggccggaacgaggaccatcgcatccccaagggtcctgttatccagatgtataccaatgtagaccaagaccttgtgggctggcccgctcctcaaggtgcccgctcattgacaccctgcacctgcggctcctcggacctttacttggtcacgaggcacgccgatgtcttcccgtgcgccggcggggtgatagcaggggcagcctgctctcgccccggcctatttcctacttgaaaggctcctcgggaggtccgctgttgtgccccgcgggacacgccgtgggcatatttagggcgcggtgtgtacccgtggagtggctaaggcggtggactttatccccgtggagagcctggaaacaaccatgaggtccccggtgtttacggacaactcctccccaccagcggtgccccagaccttccaggtggcccatttgcatctcccacaggcagcggcaagagcaccaaagtcccggctgcatatgcagctcagggttataaggtgctagtgctcaacccctctgtcgctgcaacattgggctttggtgcctacatgtctaaggcccagggatcgatcctaacatcaggaccggggtgaggacaattaccactggcagccccatcacgtactccacctacggtaagttccttgccgacggcgggtgctcagggggcgcttatgacataataatctgtgacgagtgccatccacggatgccacatccatcttgggcatcggcactgtccttgaccaagcagagaccgcgggggcgagactggttgtgctcgccaccgctacccctccgggctctatcactgtgccacatcccaacatgaggaggttgctctgtccaccaccggagagatccctttttacggcaaggccatcccccttgatgtaatcaagggggggagacatctcattttctgtcactcaaagaagaagtgtgacgagcttgccgcaaagctggtcgcatgggcgtcaatgccgtggcctactaccgcggtctcgacgtatctgtcatcccgaccggcggcgatgttgtcgtcgtggcaactgatgctctcatgaccggctttactggcgacttcgactcggtgatgactgcaacacgtgcgtcacccagacagtcgatttcagccttgaccctaccttcaccattgagacaaccacgcttccccaggatgctgtctcccgcactcaacgtcggggcaggactggcagggggaggcaaggcacctacgatttgtggcaccgggggagcgcccctctggcatgttcgactcgtctgtcctctgtgagtgctatgacgcgggctgtgcttggtacgagctcacgcctgccgagaccacagttaggctacgagcgtaatgaacaccccggggcttcccgtgtgtcaagaccatcttgaattttgggagggcgtctttacaggcctcacccatatagatgcccacttcctatcccagtcaccaaatacatcatgacatgtatgtcggctga

SEQ ID NO: 468 - DNA, 4869 bp, Hepatitis C virus
tcgcccacaggacgtcaagttcccgggcggcggccagatcgttggtggagtttacttgttgccgcgcaggggccctagattgggtgtgcgcgcgacgaggaagacttccgagcggtcgcaacctcgagtagacgtcagcctatccccaaggcgcgtcggtccgagggcaggacctgggctcagcccgggtacccttggcccctctatggcaatgagggttgcggatgggcgggatggctcctgtccccccgtggtctcggcctagctggggccccacagacccccggcgtaggtcgcgcaatttgggcaaggtcatcgataccctcacgtgcggcttcgccgacctcatggggtacataccgctcgtcggcgcccctcttgggggcgctgccaggccctggcgcatggagtccgggttctggaagacggcgtgaattatgcaacagggaacctccccggttgctctttctctatcttccttctggccttgctctcttgcctgactgtgcccgcttcagcctacaagtgcgcaactccacggggctttaccatgtcaccaatgattgccctaattcgagtattgtgtacgaggcggccgatgctatcctgcacaccccggggtgtgtcccttgcgttcgtaagggtaacacctcggtgtgttggtggcggtaacccctacggtggccaccagggacggcaaactccccacaacgcagcttcgacgtcatatcgatctgctcgtcgggagtgccaccctctgttcggccctctatgtgggggacctgtgcggtctgtctttcttgttggccaactgtttaccctctctcccagacgccactggacaacgcaaggctgcaattgttccatctatcccggccatataacgggccaccgcatggcatgggatatgatgatgaactggtcccctacacggcgttggtaatggcacagctgctccggatcccacaagccatcatggacatgatcgctggtgctcactggggagtcctggcgggcatagcgtatttctctatggtggggaactgggcgaaggtcctgtagtgctgctgctatttgccggcgtcgacgcaaaaacttatgtcaccgggggagctgctgcccacaccacgtccggacttgctgggctcttcttacaaggccccaagcagaacgtccacttgatcaacaccaacggcagtggcacatcaatagtacggccttgaactgcaacgctagccttgacaccggctggatagcagggcttttctattacaacaaattcaactcttcaggttgtcccgagaggttggccagctgccgactcctactgattttgaccagggctggggccctatcagtcatgccaacggaagcggccccgaccaacgcccctactgctggcactaccccccaaaaccttgcggcattgtgcccgcgaagagtgtgtgtggcccggtatattgcttcctcccagccctgtggtggtgggaacgaccgacaggtcgggcgaacctacctacaactggggtgaaaatgatacggacgtcttcgtccttaacaacatcaggccaccgctgggtaattggtttggttgacctggatgaactcaaccggattcaccaaagtgtgcggggcgcctccttgtgacatcgggggggcgggcaacaacaccttgcactgccccactgattgtttccgcaagcatccggaagccacgtactctcggtgcggctccgtccctggatcacgcccaggtgcctggtccattacccatacaggctttggcattatccctgtaccatcaactacaccatatttaaagtcaggatgtacgtgggagggatcgagcacaggttggaagcgcctgcaactggacgcggggcgagcgttgcgatctggaagacagggacaggtccgagcttagcccgttgctgctgtctaccacacagtggcaagtccttccgtgttccttcacggccatgccagccttgtccaccggcctctccacctccaccagaacattgtggatgtgcagtatttgtacggggtggggtcaagcattgcgtcctgggccattaagtgggagtacgtcgttctcctgttccttttgcttgcagacgcgcgcgtctgtcctgcttgtggatgatgttactcatatcccaagcggaggcggctttggagaaccttgtaatactcaatgcagcatccctggccgggacgcacggtcttgtatccttcctcgtgttcttctgctttgcatggtatctgaaagcaggtgggtgcccggagcggcttacgccttctacgggatgtggcctctcctcctgctcctgctggcgttgccccagcgggcatacgcgctggacacggaggtggccgcgtcgtgtggcggcgttgtcttgtcgggttaatggcgctgactttatcaccacactacaagcgctatatcagctggtgcttatggtggcttcagtattttctgaccagagcggaagcgcagctgcacgtgtgggttccccccctcaacgtccgggggggggtgacgctgtcatcttactcatgtgtgttgtacacccgactctggtattcgacatcaccaaaatgctgctggccgtctatggacccctctggattcttcaagccagtttgcttgaggtaccctacttgtgcgcgtccaaggccttctccggatctgcgcgctagcgcggaagatggtcggaggccattacgtgcaaatggccatcatcaagttaggggcgcttactggcacctatatttataatcatctcacccctcttcaggactggcgcacaacggcctgcgagacctggccgcggctgtagagccagtcgttttctcccaaatggagaccaagctcatcacgtggggggcagacactgccgcgtgcggtgacattgtcgacggcttacccgttccgcccgtaggggccgggagatactgcttgggccggccgatggaatggtctccaaggggtggaggttgctggcgcccatcacggcgtacgcccagcagacaaggggcctcctagggtgtataatcaccagcctaactggcgggacaaaaaccaagtggaaggtgaggtccagattgtgtcgactgctgcccaaactttcctggcaacgtgcatcaatggggtatgctggactgtctaccacggggccggaacgaggaccatcgcatccccaagggtcctgttatccagatgtataccaatgtagaccaagaccttgtgggctggcccgctcctcaaggtgcccgctcattgacaccctgcacctgcggctcctcggacctttacttggtcacgaggcacgccgatgtcttcccgtgcgccggcggggtgatagcaggggcagcctgctctcgccccggcctatttcctacttgaaaggctcctcgggaggtccgctgttgtgccccgcgggacacgccgtgggcatatttagggcgcggtgtgtacccgtggagtggctaaggcggtggactttatccccgtggagagcctggaaacaaccatgaggtccccggtgtttacggacaactcctccccaccagcggtgccccagaccttccaggtggcccatttgcatctcccacaggcagcggcaagagcaccaaagtcccggctgcatatgcagctcagggttataaggtgctagtgctcaacccctctgtcgctgcaacattgggctttggtgcctacatgtctaaggcccagggatcgatcctaacatcaggaccggggtgaggacaattaccactggcagccccatcacgtactccacctacggtaagttccttgccgacggcgggtgctcagggggcgcttatgacataataatctgtgacgagtgccatccacggatgccacatccatcttgggcatcggcactgtccttgaccaagcagagaccgcgggggcgagactggttgtgctcgccaccgctacccctccgggctctatcactgtgccacatcccaacatgaggaggttgctctgtccaccaccggagagatccctttttacggcaaggccatcccccttgatgtaatcaagggggggagacatctcattttctgtcactcaaagaagaagtgtgacgagcttgccgcaaagctggtcgcatgggcgtcaatgccgtggcctactaccgcggtctcgacgtatctgtcatcccgaccggcggcgatgttgtcgtcgtggcaactgatgctctcatgaccggctttactggcgacttcgactcggtgatgactgcaacacgtgcgtcacccagacagtcgatttcagccttgaccctaccttcaccattgagacaaccacgcttccccaggatgctgtctcccgcactcaacgtcggggcaggactggcagggggaggcaaggcacctacgatttgtggcaccgggggagcgcccctctggcatgttcgactcgtctgtcctctgtgagtgctatgacgcgggctgtgcttggtacgagctcacgcctgccgagaccacagttaggctacgagcgtaatgaacaccccggggcttcccgtgtgtcaagaccatcttgaattttgggagggcgtctttacaggcctcacccatatagatgcccacttcctatcccagacaaaacagagcggggagaatcttccttacctggtagcgtacaagccaccgtgtgcgctagggcgcaagccccccccccatcgtgggaccagatgtggaagtgtttggtccgcctcaaacccaccctccacgggccaacacccctgctatacagactgggtgctgttcaaatgaagtcaccctgacgcacccagtcaccaaatacatcatgacatgtatgtcggctga

SEQ ID NO: 469 - DNA, 4869 bp, Hepatitis C virus
tcgcccacaggacgtcaagttcccgggcggcggccagatcgttggtggagtttacttgttgccgcgcaggggccctagattgggtgtgcgcgcgacgaggaagacttccgagcggtcgcaacctcgagtagacgtcagcctatccccaaggcgcgtcggtccgagggcaggacctgggctcagcccgggtacccttggcccctctatggcaatgagggttgcggatgggcgggatggctcctgtccccccgtggtctcggcctagctggggccccacagacccccggcgtaggtcgcgcaatttgggcaaggtcatcgataccctcacgtgcggcttcgccgacctcatggggtacataccgctcgtcggcgcccctcttgggggcgctgccaggccctggcgcatggagtccgggttctggaagacggcgtgaattatgcaacagggaacctccccggttgctctttctctatcttccttctggccttgctctcttgcctgactgtgcccgcttcagcctacaagtgcgcaactccacggggctttaccatgtcaccaatgattgccctaattcgagtattgtgtacgaggcggccgatgctatcctgcacaccccggggtgtgtcccttgcgttcgtaagggtaacacctcggtgtgttggtggcggtaacccctacggtggccaccagggacggcaaactccccacaacgcagcttcgacgtcatatcgatctgctcgtcgggagtgccaccctctgttcggccctctatgtgggggacctgtgcggtctgtctttcttgttggccaactgtttaccctctctcccagacgccactggacaacgcaaggctgcaattgttccatctatcccggccatataacgggccaccgcatggcatgggatatgatgatgaactggtcccctacacggcgttggtaatggcacagctgctccggatcccacaagccatcatggacatgatcgctggtgctcactggggagtcctggcgggcatagcgtatttctctatggtggggaactgggcgaaggtcctgtagtgctgctgctatttgccggcgtcgacgcaaaaacttatgtcaccgggggagctgctgcccacaccacgtccggacttgctgggctcttcttacaaggccccaagcagaacgtccacttgatcaacaccaacggcagtggcacatcaatagtacggccttgaactgcaacgctagccttgacaccggctggatagcaggacttttctattacaacaaattcaactcttcaggttgtcccgagaggttggccagctgccgactcctactgattttgaccagggctggggccctatcagtcatgccaatggaagcggccccgaccaacgcccctactgctggcactaccccccaaaaccttgcggcattgtgcccgcgaagagtgtgtgtggcccggtatattgcttcctcccagccctgtggtggtgggaacgaccgacgggtcgggcgtacctacctacaactggggtgaaaatgatacggacgtcttcgtccttaacaacatcaggccaccgctgggtaattggtttggttgacctggatgaactcaactggattcaccaaagtgtgcggggcgcctccttgtgacatcgggggggcgggcaacaacaccttgcactgccccactgattgtttccgcaagcatccggaagccacgtactctcggtgcggctccgtccctggatcacgcccaggtgcctggtccactacccatacaggctttggcattatccctgtaccatcaactacaccatatttaaagtcaggatgtacgtgggagggatcgagcacaggttggaagcgcctgcaactggacgcggggcgagcgttgcgatctggaagacagggacaggtccgagcttagcccgttgctgctgtctaccacacagtggcaagtccttccgtgttccttcacggccatgccagccttgtccaccggcctctccacctccaccagaacattgtggatgtgcagtatttgtacggggtggggtcaagcattgcgtcctgggccattaagtgggagtacgtcgttctcctgttccttttgcttgcagacgcgcgcgtctgtcctgcttgtggatgatgttactcatatcccaagcggaggcggctttggagaaccttgtaatactcaatgcagcatccctggccgggacgcacggtcttgtatccttcctcgtgttcttctgctttgcatggtatctgaaagcaggtgggtgcccggagcggcttacgccttctacgggatgtggcctctcctcctgctcctgctggcgttgccccagcgggcatacgcgctggacacggaggtggccgcgtcgtgtggcggcgttgtcttgtcgggttaatggcgctgactttatcaccacactacaagcgctatatcagctggtgcttatggtggcttcagtattttctgaccagagcggaagcgcagctgcacgtgtgggttccccccctcaacgtccgggggggggtgacgctgtcatcttactcatgtgtgttgtacacccgactctggtattcgacatcaccaaaatgctgctggccgtctatggacccctctggattcttcaagccagtttgcttgaggtaccctacttgtgcgcgtccaaggccttctccggatctgcgcgctagcgcggaagatggtcggaggccattacgtgcaaatggccatcatcaagttaggggcgcttactggcacctatatttataatcatctcacccctcttcaggactggcgcacaacggcctgcgagacctggccgcggctgtagagccagtcgtcttctcccaaatggagaccaagctcatcacgtggggggcagacactgccgcgtgcggtgacattgtcgacggcttacccgttccgcccgtaggggccgggagatactgcttgggccggccgatggaatggtctccaaggggtggaggttgctggcgcccatcacggcgtacgcccagcagacaaggggcctcctagggtgtataatcaccagcctaactggcgggacaaaaaccaagtggaaggtgaggtccagattgtgtcgactgctgcccaaactttcctggcaacgtgcatcaatggggtatgctggactgtctaccacggggccggaacgaggaccatcgcatccccaagggtcctgttatccagatgtataccaatgtagaccaagaccttgtgggctggcccgctcctcaaggtgcccgctcattgacaccctgcacctgcggctcctcggacctttacttggtcacgaggcacgccgatgtcttcccgtgcgccggcggggtgatagcaggggcagcctgctctcgccccggcctatttcctacttgaaaggctcctcgggaggtccgctgttgtgccccgcgggacacgccgtgggcatatttagggcgcggtgtgtacccgtggagtggctaaggcggtggactttatccccgtggagagcctggaaacaaccatgaggtccccggtgtttacggacaactcctccccaccagcggtgccccagaccttccaggtggcccatttgcatctcccacaggcagcggcaagagcaccaaagtcccggctgcatatgcagctcagggttataaggtgctagtgctcaacccctctgtcgctgcaacattgggctttggtgcctacatgtctaaggcccagggatcgatcctaacatcaggaccggggtgaggacaattaccactggcagccccatcacgtactccacctacggtaagttccttgccgacggcgggtgctcagggggcgcttatgacataataatctgcgacgagtgccatccacggatgccacatccatcttgggcatcggcactgtccttgaccaagcagagaccgcgggggcgagactggttgtgctcgccaccgctacccctccgggctctatcactgtgccacatcccaacatgaggaggttgctctgtccaccaccggagagatccctttttacggcaaggccatcccccttgatgtaatcaagggggggagacatctcattttctgtcactcaaagaagaagtgtgacgagcttgccgcaaagctggtcgcatgggcgtcaatgccgtggcctactaccgcggtctcgacgtatctgtcatcccgaccggcggcgatgttgtcgtcgtggcaactgatgctctcatgaccggctttactggcgacttcgactcggtgatgactgcaacacgtgcgtcacccagacagtcgatttcagccttgaccctaccttcaccattgagacaaccacgcttccccaggatgctgtctcccgcactcaacgtcggggcaggactggcagggggaggcaaggcacctacgatttgtggcaccgggggagcgcccctctggcatgttcgactcgtctgtcctctgtgagtgctatgacgcgggctgtgcttggtacgagctcacgcctgccgagaccacagttaggctacgagcgtaatgaacaccccggggcttcccgtgtgtcaagaccatcttgaattttgggagggcgtctttacaggcctcacccatatagatgcccacttcctatcccagacaaaacagagcggggagaatcttccttacctggtagcgtacaagccaccgtgtgcgctagggcgcaagccccccccccatcgtgggaccagatgtggaagtgtttggtccgcctcaaacccaccctccacgggccaacacccctgctatacagactgggtgctgttcaaatgaagtcaccctgacgcacccagtcaccaaatacatcatgacatgtatgtcggctga

SEQ ID NO: 470 - DNA, 4869 bp, Hepatitis C virus
tcgcccacaggacgtcaagttcccgggcggcggccagatcgttggtggagtttacttgttgccgcgcaggggccctagattgggtgtgcgcgcgacgaggaagacttccgagcggtcgcaacctcgagtagacgtcagcctatccccaaggcgcgtcggtccgagggcaggacctgggctcagcccgggtacccttggcccctctatggcaatgagggttgcggatgggcgggatggctcctgtccccccgtggtctcggcctagctggggccccacagacccccggcgtaggtcgcgcaatttgggcaaggtcatcgataccctcacgtgcggcttcgccgacctcatggggtacataccgctcgtcggcgcccctcttgggggcgctgccaggccctggcgcatggagtccgggttctggaagacggcgtgaattatgcaacagggaacctccccggttgctctttctctatcttccttctggccttgctctcttgcctgactgtgcccgcttcagcctacaagtgcgcaactccacggggctttaccatgtcaccaatgattgccctaattcgagtattgtgtacgaggcggccgatgctatcctgcacaccccggggtgtgttccttgcgttcgtaagggtaacacctcggtgtgttggtggcggtaacccctacggtggccaccagggacggcaaactccccacaacgcagcttcgacgtcatatcgatctgctcgtcgggagtgccaccctctgttcggccctctatgtgggggacctgtgcggtctgtctttcttgttggccaactgtttaccctctctcccagacgccactggacaacgcaaggctgcaattgttccatctatcccggccatataacgggccaccgcatggcatgggatatgatgatgaactggtcccctacacggcgttggtaatggcacagctgctccggatcccacaagccatcatggacatgatcgctggtgctcactggggagtcctggcgggcatagcgtatttctctatggtggggaactgggcgaaggtcctgtagtgctgctgctatttgccggcgtcgacgcaaaaacttatgtcaccgggggagctgctgcccacaccacgtccggacttgctgggctcttcttacaaggccccaagcagaacgtccacttgatcaacaccaacggcagtggcacatcaatagtacggccttgaactgcaacgctagccttgacaccggctggatagcagggcttttctattacaacaaattcaactcttcaggttgtcccgagaggttggccagctgccgactcctactgattttgaccagggctggggccctatcagtcatgccaacggaagcggccccgaccaacgcccctactgctggcactaccccccaaaaccttgcggcattgtgcccgcgaagagtgtgtgtggcccggtatattgcttcctcccagccctgtggtggtgggaacgaccgacaggtcgggcgaacctacctacaactggggtgaaaatgatacggacgtcttcgtccttaacaacatcaggccaccgctgggtaattggtttggttgacctggatgaactcaactggattcaccaaagtgtgcggggcgcctccttgtgacatcgggggggcgggcaacaacaccttgcactgccccactgattgtttccgcaagcatccggaagccacgtactctcggtgcggctccgtccctggatcacgcccaggtgcctggtccactacccatacaggctttggcattatccctgtaccatcaactacaccatatttaaagtcaggatgtacgtgggagggatcgagcacaggttggaagcgcctgcaactggacgcggggcgagcgttgcgatctggaagacagggacaggtccgagcttagcccgttgctgctgtctaccacacagtggcaagtccttccgtgttccttcacggccatgccagccttgtccaccggcctctccacctccaccagaacattgtggatgtgcagtatttgtacggggtggggtcaagcattgcgtcctgggccattaagtgggagtacgtcgttctcctgttccttttgcttgcagacgcgcgcgtctgtcctgcttgtggatgatgttactcatatcccaagcggaggccgctttggagaaccttgtaatactcaatgcagcatccctggccgggacgcacggtcttgtatccttcctcgtgttcttctgctttgcatggtatctgaaagcaggtgggtgcccggagcggcttacgccttctacgggatgtggcctctcctcctgctcctgctggcgttgccccagcgggcatacgcgctggacacggaggtggccgcgtcgtgtggcggcgttgtcttgtcgggttaatggcgctgactttatcaccacactacaagcgctatatcagctggtgcttatggtggcttcagtattttctgaccagagcggaagcgcagctgcacgtgtgggttccccccctcaacgtccgggggggggtgacgctgtcatcttactcatgtgtgttgtacacccgactctggtattcgacatcaccaaaatgctgctggccgtctatggacccctctggattcttcaagccagtttgcttgaggtaccctacttgtgcgcgtccaaggccttctccggatctgcgcgctagcgcggaagatggtcggaggccattacgtgcaaatggccatcatcaagttaggggcgcttactggcacctatatttataatcatctcacccctcttcaggactggcgcacaacggcctgcgagacctggccgcggctgtagagccagtcgtcttctcccaaatggagaccaagctcatcacgtggggggcagacactgccgcgtgcggtgacattgtcgacggcttacccgttccgcccgtaggggccgggagatactgcttgggccggccgatggaatggtctccaaggggtggaggttgctggcgcccatcacggcgtacgcccagcagacaaggggcctcctagggtgtataatcaccagcctaactggcgggacaaaaaccaagtggaaggtgaggtccagattgtgtcgactgctgcccaaactttcctggcaacgtgcatcaatggggtatgctggactgtctaccacggggccggaacgaggaccatcgcatccccaagggtcctgttatccagatgtataccaatgtagaccaagaccttgtgggctggcccgctcctcaaggtgcccgctcattgacaccctgcacctgcggctcctcggacctttacttggtcacgaggcacgccgatgtcttcccgtgcgccggcggggtgatagcaggggcagcctgctctcgccccggcctatttcctacttgaaaggctcctcgggaggtccgctgttgtgccccgcgggacacgccgtgggcatatttagggcgcggtgtgtacccgtggagtggctaaggcggtggactttatccccgtggagagcctggaaacaaccatgaggtccccggtgtttacggacaactcctccccaccagcggtgccccagaccttccaggtggcccatttgcatctcccacaggcagcggcaagagcaccaaagtcccggctgcatatgcagctcagggttataaggtgctagtgctcaacccctctgtcgctgcaacattgggctttggtgcctacatgtctaaggcccagggatcgatcctaacatcaggaccggggtgaggacaattaccactggcagccccatcacgtactccacctacggtaagttccttgccgacggcgggtgctcagggggcgcttatgacataataatctgtgacgagtgccatccacggatgccacatccatcttgggcatcggcactgtccttgaccaagcagagaccgcgggggcgagactggttgtgctcgccaccgctacccctccgggctctatcactgtgccacatcccaacatgaggaggttgctctgtccaccaccggagagatccctttttacggcaaggccatcccccttgatgtaatcaagggggggagacatctcattttctgtcactcaaagaagaagtgtgacgagcttgccgcaaagctggtcgcatgggcgtcaatgccgtggcctactaccgcggtctcgacgtatctgtcatcccgaccggcggcgatgttgtcgtcgtggcaactgatgctctcatgaccggctttactggcgacttcgactcggtgatgactgcaacacgtgcgtcacccagacagtcgatttcagccttgaccctaccttcaccattgagacaaccacgcttccccaggatgctgtctcccgcactcaacgtcggggcaggactggcagggggaggcaaggcacctacgatttgtggcaccgggggagcgcccctctggcatgttcgactcgtctgtcctctgtgagtgctatgacgcgggctgtgcttggtacgagctcacgcctgccgagaccacagttaggctacgagcgtaatgaacaccccggggcttcccgtgtgtcaagaccatcttgaattttgggagggcgtctttacaggcctcacccatatagatgcccacttcctatcccagacaaaacagagcggggagaatcttccttacctggtagcgtacaagccaccgtgtgcgctagggcgcaagccccccccccatcgtgggaccagatgtggaagtgtttggtccgcctcaaacccaccctccacgggccaacacccctgctatacagactgggtgctgttcaaatgaagtcaccctgacgcacccagtcaccaaatacatcatgacatgtatgtcggctga

SEQ ID NO: 471 - DNA, 4869 bp, Hepatitis C virus
tcgcccacaggacgtcaagttcccgggcggcggccagatcgttggtggagtttacttgttgccgcgcaggggccctagattgggtgtgcgcgcgacgaggaagacttccgagcggtcgcaacctcgagtagacgtcagcctatccccaaggcgcgtcggtccgagggcaggacctgggctcagcccgggtacccttggcccctctatggcaatgagggttgcggatgggcgggatggctcctgtccccccgtggtctcggcctagctggggccccacagacccccggcgtaggtcgcgcaatttgggcaaggtcatcgataccctcacgtgcggcttcgccgacctcatggggtacataccgctcgtcggcgcccctcttgggggcgctgccaggccctggcgcatggagtccgggttctggaagacggcgtgaattatgcaacagggaacctccccggttgctctttctctatcttccttctggccttgctctcttgcctgactgtgcccgcttcagcctacaagtgcgcaactccacggggctttaccatgtcaccaatgattgccctaattcgagtattgtgtacgaggcggccgatgctatcctgcacaccccggggtgtgtcccttgcgttcgtaagggtaacacctcggtgtgttggtggcggtaacccctacggtggccaccagggacagcaaactccccacaacgcagcttcgacgtcatatcgatctgctcgtcgggagtgccaccctctgttcggccctctatgtgggggacctgtgcggtctgtctttcttgttggccaactgtttaccctctctcccagacgccactggacaacgcaaggctgcaattgttccatctatcccggccatataacgggccaccgcatggcatgggatatgatgatgaactggtcccctacacggcgttggtaatggcacagctgctccggatcccacaagccatcatggacatgatcgctggtgctcactggggagtcctggcgggcatagcgtatttctctatggtggggaactgggcgaaggtcctgtagtgctgctgctatttgccggcgtcgacgcaaaaacttatgtcaccgggggagctgctgcccacaccacgtccggacttgctgggctcttcttacaaggccccaagcagaacgtccacttgatcaacaccaacggcagtggcacatcaatagtacggccttgaactgcaacgctagcctcgacaccggctggatagcagggcttttctattacaacaaattcaactcttcaggttgtcccgagaggttggccagctgccgactcctactgattttgaccagggctggggccctatcagtcatgccaacggaagcggccccgaccaacgcccctactgctggcactaccccccaaaaccttgcggcattgtgcccgcgaagagtgtgtgtggcccggtatattgcttcctcccagccctgtggtggtgggaacgaccgacaggtcgggcgaacctacctacaactggggtgaaaatgatacggacgtcttcgtccttaacaacatcaggccaccgctgggtaattggtttggttgacctggatgaactcaactggattcaccaaagtgtgcggggcgcctccttgtgacatcgggggggcgggcaacaacaccttgcactgccccactgattgtttccgcaagcatccggaagccacgtactctcggtgcggctccgtccctggatcacgcccaggtgcctggtccactacccatacaggctttggcattatccctgtaccatcaactacaacatatttaaagtcaggatgtacgtgggagggatcgagcacaggttggaagcgcctgcaactggacgcggggcgagcgttgcgatctggaagacagggacaggtccgagcttagcccgttgctgctgtctaccacacagtggcaagtccttccgtgttccttcacggccatgccagccttgtccaccggcctctccacctccaccagaacattgtggatgtgcagtatttgtacggggtggggtcaagcattgcgtcctgggccattaagtgggagtacgtcgttctcctgttccttttgcttgcagacgcgcgcgtctgtcctgcttgtggatgatgttactcatatcccaagcggaggcggctttggagaaccttgtaatactcaatgcagcatccctggccgggacgcacggtcttgtatccttcctcgtgttcttctgctttgcatggtatctgaaagcaggtgggtgcccggagcggcttacgccttctacgggatgtggcctctcctcctgctcctgctggcgttgccccagcgggcatacgcgctggacacggaggtggccgcgtcgtgtggcggcgttgtcttgtcgggttaatggcgctgactttatcaccacactacaagcgctatatcagctggtgcttatggtggcttcagtattttctgaccagagcggaagcgcagctgcacgtgtgggttccccccctcaacgtccgggggggggtgacgctgtcatcttactcatgtgtgttgtacacccgactctggtattcgacatcaccaaaatgctgctggccgtctatggacccctctggattcttcaagccagtttgcttgaggtaccctacttgtgcgcgtccaaggccttctccggatctgcgcgctagcgcggaagatggtcggaggccattacgtgcaaatggccatcatcaagttaggggcgcttactggcacctatatttataatcatctcacccctcttcaggactggcgcacaacggcctgcgagacctggccgcggctgtagagccagtcgtcttctcccaaatggagaccaagctcatcacgtggggggcagacactgccgcgtgcggtgacattgtcgacggcttacccgttccgcccgtaggggccgggagatactgcttgggccggccgatggaatggtctccaaggggtggaggttgctggcgcccatcacggcgtacgcccagcagacaaggggcctcctagggtgtataatcaccagcctaactggcgggacaaaaaccaagtggaaggtgaggtccagattgtgtcgactgctgcccaaactttcctggcaacgtgcatcaatggggtatgctggactgtctaccacggggccggaacgaggaccatcgcatccccaagggtcctgttatccagatgtataccaatgtagaccaagaccttgtgggctggcccgctcctcaaggtgcccgctcattgacaccctgcacctgcggctcctcggacctttacttggtcacgaggcacgccgatgtcttcccgtgcgccggcggggtgatagcaggggcagcctgctctcgccccggcctatttcctacttgaaaggctcctcgggaggtccgctgttgtgccccgcgggacacgccgtgggcatatttagggcgcggtgtgtacccgtggagtggctaaggcggtggactttatccccgtggagagcctggaaacaaccatgaggtccccggtgtttacggacaactcctccccaccagcggtgccccagaccttccaggtggcccatttgcatctcccacaggcagcggcaagagcaccaaagtcccggctgcatatgcagctcagggttataaggtgctagtgctcaacccctctgtcgctgcaacattgggctttggtgcctacatgtctaaggcccagggatcgatcctaacatcaggaccggggtgaggacaattaccactggcagccccatcacgtactccacctacggtaagttccttgccgacggcgggtgctcagggggcgcttatgacataataatctgtgacgagtgccatccacggatgccacatccatcttgggcatcggcactgtccttgaccaagcagagaccgcgggggcgagactggttgtgctcgccaccgctacccctccgggctctatcactgtgccacatcccaacatgaggaggttgctctgtccaccaccggagagatccctttttacggcaaggccatcccccttgatgtaatcaagggggggagacatctcattttctgtcactcaaagaagaagtgtgacgagcttgccgcaaagctggtcgcatgggcgtcaatgccgtggcctactaccgcggtctcgacgtatctgtcatcccgaccggcggcgatgttgtcgtcgtggcaactgatgctctcatgaccggctttactggcgacttcgactcggtgatgactgcaacacgtgcgtcacccagacagtcgatttcagccttgaccctaccttcaccattgagacgaccacgcttccccaggatgctgtctcccgcactcaacgtcggggcaggactggcagggggaggcaaggcacctacgatttgtggcaccgggggagcgcccctctggcatgttcgactcgtctgtcctctgtgagtgctatgacgcgggctgtgcttggtacgagctcacgcctgccgagaccacagttaggctacgagcgtaatgaacaccccggggcttcctgtgtgtcaagaccatcttgaattttgggagggcgtctttacaggcctcacccatatagatgcccacttcctatcccagacaaaacagagcggggagaatcttccttacctggtagcgtacaagccaccgtgtgcgctagggcgcaagccccccccccatcgtgggaccagatgtggaagtgtttggtccgcctcaaacccaccctccacgggccaacacccctgctatacagactgggtgctgttcaaatgaagtcaccctgacgcacccagtcaccaaatacatcatgacatgtatgtcggctga

SEQ ID NO: 472 - DNA, 4869 bp, Hepatitis C virus
tcgcccacaggacgtcaagttcccgggcggcggccagatcgttggtggagtttacttgttgccgcgcaggggccctagattgggtgtgcgcgcgacgaggaagacttccgagcggtcgcaacctcgagtagacgtcagcctatccccaaggcgcgtcggtccgagggcaggacctgggctcagcccgggtacccttggcccctctatggcaatgagggttgcggatgggcgggatggctcctgtccccccgtggtctcggcctagctggggccccacagacccccggcgtaggtcgcgcaatttgggcaaggtcatcgataccctcacgtgcggcttcgccgacctcatggggtacataccgctcgtcggcgcccctcttgggggcgctgccaggccctggcgcatggagtccgggttctggaagacggcgtgaattatgcaacagggaacctccccggttgctctttctctatcttccttctggccttgctctcttgcctgactgtgcccgcttcagcctacaagtgcgcaactccacggggctttaccatgtcaccaatgattgccctaattcgagtattgtgtacgaggcggccgatgctatcctgcacaccccggggtgtgtcccttgcgttcgtaagggtaacacctcggtgtgttggtggcggtaacccctacggtggccaccagggacggcaaactccccacaacgcagcttcgacgtcatatcgatctgctcgtcgggagtgccaccctctgttcggccctctatgtgggggacctgtgcggtctgtctttcttgttggccaactgtttaccctctctcccagacgccactggacaacgcaaggctgcaattgttccatctatcccggccatataacgggccaccgcatggcatgggatatgatgatgaactggtcccctacacggcgttggtaatggcacagctgctccggatcccacaagccatcatggacatgatcgctggtgctcactggggagtcctggcgggcatagcgtatttctctatggtggggaactgggcgaaggtcctgtagtgctgctgctatttgccggcgtcgacgcaaaaacttatgtcaccgggggagctgctgcccacaccacgtccggacttgctgggctcttcttacaaggccccaagcagaacgtccacttgatcaacaccaacggcagtggcacatcaatagtacggccttgaactgcaacgctagccttgacaccggctggatagcaggacttttctattacaacaaattcaactcttcaggttgtcccgagaggttggccagctgccgactcctactgattttgaccagggctggggccctatcagtcatgccaacggaagcggccccgaccaacgcccctactgctggcactaccccccaaaaccttgcggcattgtgcccgcgaagagtgtgtgtggcccggtatattgcttcctcccagccctgtggtggtgggaacgaccgacgggtcgggcgtacctacctacaactggggtgaaaatgatacggacgtcttcgtccttaacaacatcaggccaccgctgggtaattggtttggttgacctggatgaactcaactggattcaccaaagtgtgcggggcgcctccttgtgacatcgggggggcgggcaacaacaccttgcactgccccactgattgtttccgcaagcatccggaagccacgtactctcggtgcggctccgtccctggatcacgcccaggtgcctggtccactacccatacaggctttggcattatccctgtaccatcaactacaccatatttaaagtcaggatgtacgtgggagggatcgagcacaggttggaagcgcctgcaactggacgcggggcgagcgttgcgatctggaagacagggacaggtccgagcttagcccgttgctgctgtctaccacacagtggcaagtccttccgtgttccttcacggccatgccagccttgtccaccggcctctccacctccaccagaacattgtggatgtgcagtatttgtacggggtggggtcaagcattgcgtcctgggccattaagtgggagtacgtcgttctcctgttccttttgcttgcagacgcgcgcgtctgtcctgcttgtggatgatgttactcatatcccaagcggaggcggctttggagaaccttgtaatactcaatgcagcatccctggccgggacgcacggtcttgtatccttcctcgtgttcttctgctttgcatggtatctgaaagcaggtgggtgcccggagcggcttacgccttctacgggatgtggcctctcctcctgctcctgctggcgttgccccagcgggcatacgcgctggacacggaggtggccgcgtcgtgtggcggcgttgtcttgtcgggttaatggcgctgactttatcaccacactacaagcgctatatcagctggtgcttatggtggcttcagtattttctgaccagagcggaagcgcagctgcacgtgtgggttccccccctcaacgtccgggggggggtgacgctgtcatcttactcatgtgtgttgtacacccgactctggtattcgacatcaccaaaatgctgctggccgtctatggacccctctggattcttcaagccagtttgcttgaggtaccctacttgtgcgcgtccaaggccttctccggatctgcgcgctagcgcggaagatggtcggaggccattacgtgcaaatggccatcatcaagttaggggcgcttactggcacctatatttataatcatctcacccctcttcaggactggcgcacaacggcctgcgagacctggccgcggctgtagagccagtcgtcttctcccaaatggagaccaagctcatcacgtggggggcagacactgccgcgtgcggtgacattgtcgacggcttacccgttccgcccgtaggggccgggagatactgcttgggccggccgatggaatggtctccaaggggtggaggttgctggcgcccatcacggcgtacgcccagcagacaaggggcctcctagggtgtataatcaccagcctaactggcgggacaaaaaccaagtggaaggtgaggtccagattgtgtcgactgctgcccaaactttcctggcaacgtgcatcaatggggtatgctggactgtctaccacggggccggaacgaggaccatcgcatccccaagggtcctgttatccagatgtataccaatgtagaccaagaccttgtgggctggcccgctcctcaaggtgcccgctcattgacaccctgcacctgcggctcctcggacctttacttggtcacgaggcacgccgatgtcttcccgtgcgccggcggggtgatagcaggggcagcctgctctcgccccggcctatttcctacttgaaaggctcctcgggaggtccgctgttgtgccccgcgggacacgccgtgggcatatttagggcgcggtgtgtacccgtggagtggctaaggcggtggactttatccccgtggagagcctggaaacaaccatgaggtccccggtgtttacggacaactcctccccaccagcggtgccccagaccttccaggtggcccatttgcatctcccacaggcagcggcaagagcaccaaagtcccggctgcatatgcagctcagggttataaggtgctagtgctcaacccctctgtcgctgcaacattgggctttggtgcctacatgtctaaggcccagggatcgatcctaacatcaggaccggggtgaggacaattaccactggcagccccatcacgtactccacctacggtaagttccttgccgacggcgggtgctcagggggcgcttatgacataataatctgtgacgagtgccatccacggatgccacatccatcttgggcatcggcactgtccttgaccaagcagagaccgcgggggcgagactggttgtgctcgccaccgctacccctccgggctctatcactgtgccacatcccaacatgaggaggttgctctgtccaccaccggagagatccctttttacggcaaggccatcccccttgatgtaatcaagggggggagacatctcattttctgtcactcaaagaagaagtgtgacgagcttgccgcaaagctggtcgcatgggcgtcaatgccgtggcctactaccgcggtctcgacgtatctgtcatcccgaccggcggcgatgttgtcgtcgtggcaactgatgctctcatgaccggctttactggcgacttcgactcggtgatgactgcaacacgtgcgtcacccagacagtcgatttcagccttgaccctaccttcaccattgagacaaccacgcttccccaggatgctgtctcccgcactcaacgtcggggcaggactggcagggggaggcaaggcacctacgatttgtggcaccgggggagcgcccctctggcatgttcgactcgtctgtcctctgtgagtgctatgacgcgggctgtgcttggtacgagctcacgcctgccgagaccacagttaggctacgagcgtaatgaacaccccggggcttcccgtgtgtcaagaccatcttgaattttgggagggcgtctttacaggcctcacccatatagatgcccacttcctatcccagacaaaacagagcggggagaatcttccttacctggtagcgtacaagccaccgtgtgcgctagggcgcaagccccccccccatcgtgggaccagatgtggaagtgtttggtccgcctcaaacccaccctccacgggccaacacccctgctatacagactgggtgctgttcaaatgaagtcaccctgacgcacccagtcaccaaatacatcatgacatgtatgtcggctga

SEQ ID NO: 473 - DNA, 4869 bp, Hepatitis C virus
tcgcccacaggacgtcaagttcccgggcggcggccagatcgttggtggagtttacttgttgccgcgcaggggccctagattgggtgtgcgcgcgacgaggaagacttccgagcggtcgcaacctcgagtagacgtcagcctatccccaaggcgcgtcggtccgagggcaggacctgggctcagcccgggtacccttggcccctctatggcaatgaaggttgcggatgggcgggatggctcctgtccccccgtggtctcggcctagctggggccccacagacccccggcgtaggtcgcgcaatttgggcaaggtcatcgataccctcacgtgcggcttcgccgacctcatggggtacataccgctcgtcggcgcccctcttgggggcgctgccaggccctggcgcatggagtccgggttctggaagacggcgtgaattatgcaacagggaacctccccggttgctctttctctatcttccttctggccttgctctcttgcctgactgtgcccgcttcagcctacaagtgcgcaactccacggggctttaccatgtcaccaatgattgccctaattcgagtattgtgtacgaggcggccgatgctatcctgcacaccccggggtgtgtcccttgcgttcgtaagggtaacacctcggtgtgttggtggcggtaacccctacggtggccaccagggacggcaaactccccacaacgcagcttcgacgtcatatcgatctgctcgtcgggagtgccaccctctgttcggccctctatgtgggggacctgtgcggtctgtctttcttgttggccaactgtttaccctctctcccagacgccactggacaacgcaaggctgcaattgttccatctatcccggccatataacgggccaccgcatggcatgggatatgatgatgaactggtcccctacacggcgttggtaatggcacagctgctccggatcccacaagccatcatggacatgatcgctggtgctcactggggagtcctggcgggcatagcgtatttctctatggtggggaactgggcgaaggtcctgtagtgctgctgctatttgccggcgtcgacgcaggaacttatgtcaccgggggagctgctgcccacaccgcgtccggacttgctgggctcttcttacaaggccccaagcagaacgtccacttgatcaacaccaacggcagtggcacatcaatagtacggccttgaactgcaacgctagccttgacaccggctggatagcagggcttttctattacaacaaattcaactcttcaggttgtcccgagaggttggccagctgccgactcctactgattttgaccagggctggggccctatcagtcatgccaacggaagcggccccgaccaacgcccctactgctggcactaccccccaaaaccttgcggcattgtgcccgcgaagagtgtgtgtggcccggtatattgcttcctcccagccctgtggtggtgggaacgaccgacaggtcgggcgtacctacctacaactggggtgaaaatgatacggacgtcttcgtccttaacaacatcaggccaccgctgggtaattggtttggttgacctggatgaactcaactggattcaccaaagtgtgcggggcgcctccttgtgacatcgggggggcgggcaacaacaccttgcactgccccactgattgtttccgcaagcatccggaagccacgtactctcggtgcggctccgtccctggatcacgcccaggtgcctggtccactacccatacaggctttggcattatccctgtaccatcaactacaccatatttaaagtcaggatgtacgtgggagggatcgagcacaggttggaagcgcctgcaactggacgcggggcgagcgttgcgatctggaagacagggacaggtccgagcttagcccgttgctgctgtctaccacacagtggcaagtccttccgtgttccttcacggccatgccagccttgtccaccggcctctccacctccaccagaacattgtggatgtgcagtatttgtacggggtggggtcaagcattgcgtcctgggccattaagtgggagtacgtcgttctcctgttccttttgcttgcagacgcgcgcgtctgtcctgcttgtggatgatgttactcatatcccaagcggaggcggctttggagaaccttgtaatactcaatgcagcatccctggccgggacgcacggtcttgtatccttcctcgtgttcttctgctttgcatggtatctgaaagcaggtgggtgcccggagcggcttacgccttctacgggatgtggcctctcctcctgctcctgctggcgttgccccagcgggcatacgcgctggacacggaggtggccgcgtcgtgtggcggcgttgtcttgtcgggttaatggcgctgactttatcaccacactacaagcgctatatcagctggtgcttatggtggcttcagtattttctgaccagagcggaagcgcagctgcacgtgtgggttccccccctcaacgtccgggggggggtgacgctgtcatcttactcatgtgtgttgtacacccgactctggtattcgacatcaccaaaatgctgctggccgtctatggacccctctggattcttcaagccagtttgcttgaggtaccctacttgtgcgcgtccaaggccttctccggatctgcgcgctagcgcggaagatggtcggaggccattacgtgcaaatggccatcatcaagttaggggcgcttactggcacctatatttataatcatctcacccctcttcaggactggcgcacaacggcctgcgagacctggccgcggctgtagagccagtcgtcttctcccaaatggagaccaagctcatcacgtggggggcagacactgccgcgtgcggtgacattgtcgacggcttacccgttccgcccgtaggggccgggagatactgcttgggccggccgatggaatggtctccaaggggtggaggttgctggcgcccatcacggcgtacgcccagcagacaaggggcctcctagggtgtataatcaccagcctaactggcgggacaaaaaccaagtggaaggtgaggtccagattgtgtcgactgctgcccaaactttcctggcaacgtgcatcaatggggtatgctggactgtctaccacggggccggaacgaggaccatcgcatccccaagggtcctgttatccagatgtataccaatgtagaccaagaccttgtgggctggcccgctcctcaaggtgcccgctcattgacaccctgcacctgcggctcctcggacctttacttggtcacgaggcacgccgatgtcttcccgtgcgccggcggggtgatagcaggggcagcctgctctcgccccggcctatttcctacttgaaaggctcctcgggaggtccgctgttgtgccccgcgggacacgccgtgggcatatttagggcgcggtgtgtacccgtggagtggctaaggcggtggactttatccccgtggagagcctggaaacaaccatgaggtccccggtgtttacggacaactcctccccaccagcggtgccccagaccttccaggtggcccatttgcatctcccacaggcagcggcaagagcaccaaagtcccggctgcatatgcagctcagggttataaggtgctagtgctcaacccctctgtcgctgcaacattgggctttggtgcctacatgtctaaggcccagggatcgatcctaacatcaggaccggggtgaggacaattaccactggcagccccatcacgtactccacctacggtaagttccttgccgacggcgggtgctcagggggcgcttatgacataataatctgtgacgagtgccatccacggatgccacatccatcttgggcatcggcactgtccttgaccaagcagagaccgcgggggcgagactggttgtgctcgccaccgctacccctccgggctctatcactgtgccacatcccaacatgaggaggttgctctgtccaccaccggagagatccctttttacggcaaggccatcccccttgatgtaatcaagggggggagacatctcattttctgtcactcaaagaagaagtgtgacgagcttgccgcaaagctggtcgcatgggcgtcaatgccgtggcctactaccgcggtctcgacgtatctgtcatcccgaccggcggcgatgttgtcgtcgtggcaactgatgctctcatgaccggctttactggcgacttcgactcggtgatgactgcaacacgtgcgtcacccagacagtcgatttcagccttgaccctaccttcaccattgagacaaccacgcttccccaggatgctgtctcccgcactcaacgtcggggcaggactggcagggggaggcaaggcacctacgatttgtggcaccgggggagcgcccctctggcatgttcgactcgtctgtcctctgtgagtgctatgacgcgggctgtgcttggtacgagctcacgcctgccgagaccacagttaggctacgagcgtaatgaacaccccggggcttcccgtgtgtcaagaccatcttgaattttgggagggcgtctttacaggcctcacccatatagatgcccacttcctatcccagacaaaacagagcggggagaatcttccttacctggtagcgtacaagccaccgtgtgcgctagggcgcaagccccccccccatcgtgggaccagatgtggaagtgtttggtccgcctcaaacccaccctccacgggccaacacccctgctatacagactgggtgctgttcaaatgaagtcaccctgacgcacccagtcaccaaatacatcatgacatgtatgtcggctga

SEQ ID NO: 474 - DNA, 4869 bp, Hepatitis C virus
tcgcccacaggacgtcaagttcccgggcggcggccagatcgttggtggagtttacttgttgccgcgcaggggccctagattgggtgtgcgcgcgacgaggaagacttccgagcggtcgcaacctcgagtagacgtcagcctatccccaaggcgcgtcggtccgagggcaggacctgggctcagcccgggtacccttggcccctctatggcaatgagggttgcggatgggcgggatggctcctgtccccccgtggtctcggcctagctggggccccacagacccccggcgtaggtcgcgcaatttgggcaaggtcatcgataccctcacgtgcggcttcgccgacctcatggggtacataccgctcgtcggcgcccctcttgggggcgctgccaggccctggcgcatggagtccgggttctggaagacggcgtgaattatgcaacagggaacctccccggttgctctttctctatcttccttctggccttgctctcttgcctgactgtgcccgcttcagcctacaagtgcgcaactccacggggctttaccatgtcaccaatgattgccctaattcgagtattgtgtacgaggcggccgatgctatcctgcacaccccggggtgtgtcccttgcgttcgtaagggtaacacctcggtgtgttggtggcggtaacccctacggtggccaccagggacggcaaactccccacaacgcagcttcgacgtcatatcgatctgctcgtcgggagtgccaccctctgttcggccctctatgtgggggacctgtgcggtctgtctttcttgttggccaactgtttaccctctctcccagacgccactggacaacgcaaggctgcaattgttccatctatcccggccatataacgggccaccgcatggcatgggatatgatgatgaactggtcccctacacggcgttggtaatggcacagctgctccggatcccacaagccatcatggacatgatcgctggtgctcactggggagtcctggcgggcatagcgtatttctctatggtggggaactgggcgaaggtcctgtagtgctgctgctatttgccggcgtcgacgcaaaaacttatgtcaccgggggagctgctgcccacaccacgtccggacttgctgggctcttcttacaaggccccaagcagaacgtccacttgatcaacaccaacggcagtggcacatcaatagtacggccttgaactgcaacgctagccttgacaccggctggatagcagggcttttctattacaacaaattcaactcttcaggttgtcccgagaggttggccagctgccgactcctactgattttgaccagggctggggccctatcagtcatgccaacggaagcggccccgaccaacgcccctactgctggcactaccccccaaaaccttgcggcattgtgcccgcgaagagtgtgtgtggcccggtatattgcttcctcccagccctgtggtggtgggaacgaccgacaggtcgggcgaacctacctacaactggggtgaaaatgatacggacgtcttcgtccttaacaacatcaggccaccgctgggtaattggtttggttgacctggatgaactcaaccggattcaccaaagtgtgcggggcgcctccttgtgacatcgggggggcgggcaacaacaccttgcactgccccactgattgtttccgcaagcatccggaagccacgtactctcggtgcggctccgtccctggatcacgcccaggtgcctggtccactacccatacaggctttggcattatccctgtaccatcaactacaccatatttaaagtcaggatgtacgtgggagggatcgagcacaggttggaagcgcctgcaactggacgcggggcgagcgttgcgatctggaagacagggacaggtccgagcttagcccgttgctgctgtctaccacacagtggcaagtccttccgtgttccttcacggccatgccagccttgtccaccggcctctccacctccaccagaacattgtggatgtgcagtatttgtacggggtggggtcaagcattgcgtcctgggccattaagtgggagtacgtcgttctcctgttccttttgcttgcagacgcgcgcgtctgtcctgcttgtggatgatgttactcatatcccaagcggaggcggctttggagaaccttgtaatactcaatgcagcatccctggccgggacgcacggtcttgtatccttcctcgtgttcttctgctttgcatggtatctgaaagcaggtgggtgcccggagcggcttacgccttctacgggatgtggcctctcctcctgctcctgctggcgttgccccagcgggcatacgcgctggacacggaggtggccgcgtcgtgtggcggcgttgtcttgtcgggttaatggcgctgactttatcaccacactacaagcgctatatcagctggtgcttatggtggcttcagtattttctgaccagagcggaagcgcagctgcacgtgtgggttccccccctcaacgtccgggggggggtgacgctgtcatcttactcatgtgtgttgtacacccgactctggtattcgacatcaccaaaatgctgctggccgtctatggacccctctggattcttcaagccagtttgcttgaggtaccctacttgtgcgcgtccaaggccttctccggatctgcgcgctagcgcggaagatggtcggaggccattacgtgcaaatggccatcatcaagttaggggcgcttactggcacctatatttataatcatctcacccctcttcaggactggcgcacaacggcctgcgagacctggccgcggctgtagagccagtcgttttctcccaaatggagaccaagctcatcacgtggggggcagacactgccgcgtgcggtgacattgtcgacggcttacccgttccgcccgtaggggccgggagatactgcttgggccggccgatggaatggtctccaaggggtggaggttgctggcgcccatcacggcgtacgcccagcagacaaggggcctcctagggtgtataatcaccagcctaactggcgggacaaaaaccaagtggaaggtgaggtccagattgtgtcgactgctgcccaaactttcctggcaacgtgcatcaatggggtatgctggactgtctaccacggggccggaacgaggaccatcgcatccccaagggtcctgttatccagatgtataccaatgtagaccaagaccttgtgggctggcccgctcctcaaggtgcccgctcattgacaccctgcacctgcggctcctcggacctttacttggtcacgaggcacgccgatgtcttcccgtgcgccggcggggtgatagcaggggcagcctgctctcgccccggcctatttcctacttgaaaggctcctcgggaggtccgctgttgtgccccgcgggacacgccgtgggcatatttagggcgcggtgtgtacccgtggagtggctaaggcggtggactttatccccgtggagagcctggaaacaaccatgaggtccccggtgtttacggacaactcctccccaccagcggtgccccagaccttccaggtggcccatttgcatctcccacaggcagcggcaagagcaccaaagtcccggctgcatatgcagctcagggttataaggtgctagtgctcaacccctctgtcgctgcaacattgggctttggtgcctacatgtctaaggcccagggatcgatcctaacatcaggaccggggtgaggacaattaccactggcagccccatcacgtactccacctacggtaagttccttgccgacggcgggtgctcagggggcgcttatgacataataatctgtgacgagtgccatccacggatgccacatccatcttgggcatcggcactgtccttgaccaagcagagaccgcgggggcgagactggttgtgctcgccaccgctacccctccgggctctatcactgtgccacatcccaacatgaggaggttgctctgtccaccaccggagagatccctttttacggcaaggccatcccccttgatgtaatcaagggggggagacatctcattttctgtcactcaaagaagaagtgtgacgagcttgccgcaaagctggtcgcatgggcgtcaatgccgtggcctactaccgcggtctcgacgtatctgtcatcccgaccggcggcgatgttgtcgtcgtggcaactgatgctctcatgaccggctttactggcgacttcgactcggtgatgactgcaacacgtgcgtcacccagacagtcgatttcagccttgaccctaccttcaccattgagacaaccacgcttccccaggatgctgtctcccgcactcaacgtcggggcaggactggcagggggaggcaaggcacctacgatttgtggcaccgggggagcgcccctctggcatgttcgactcgtctgtcctctgtgagtgctatgacgcgggctgtgcttggtacgagctcacgcctgccgagaccacagttaggctacgagcgtaatgaacaccccggggcttcccgtgtgtcaagaccatcttgaattttgggagggcgtctttacaggcctcacccatatagatgcccacttcctatcccagacaaaacagagcggggagaatcttccttacctggtagcgtacaagccaccgtgtgcgctagggcgcaagccccccccccatcgtgggaccagatgtggaagtgtttggtccgcctcaaacccaccctccacgggccaacacccctgctatacagactgggtgctgttcaaatgaagtcaccctgacgcacccagtcaccaaatacatcatgacatgtatgtcggctga

SEQ ID NO: 475 - DNA, 4869 bp, Hepatitis C virus
tcgcccacaggacgtcaagttcccgggcggcggccagatcgttggtggagtttacttgttgccgcgcaggggccctagattgggtgtgcgcgcgacgaggaagacttccgagcggtcgcaacctcgagtagacgtcagcctatccccaaggcgcgtcggtccgagggcaggacctgggctcagcccgggtacccttggcccctctatggcaatgagggttgcggatgggcgggatggctcctgtccccccgtggtctcggcctagctggggccccacagacccccggcgtaggtcgcgcaatttgggcaaggtcatcgataccctcacgtgcggcttcgccgacctcatggggtacataccgctcgtcggcgcccctcttgggggcgctgccaggccctggcgcatggagtccgggttctggaagacggcgtgaattatgcaacagggaacctccccggttgctctttctctatcttccttctggccttgctctcttgcctgactgtgcccgcttcagcctacaagtgcgcaactccacggggctttaccatgtcaccaatgattgccctaattcgagtattgtgtacgaggcggccgatgctatcctgcacaccccggggtgtgtcccttgcgttcgtaagggtaacacctcggtgtgttggtggcggtaacccctacggtggccaccagggacggcaaactccccacaacgcagcttcgacgtcatatcgatctgctcgtcgggagtgccaccctctgttcggccctctatgtgggggacctgtgcggtctgtctttcttgttggccaactgtttaccctctctcccagacgccactggacaacgcaaggctgcaattgttccatctatcccggccatataacgggccaccgcatggcatgggatatgatgatgaactggtcccctacacggcgttggtaatggcacagctgctccggatcccacaagccatcatggacatgatcgctggtgctcactggggagtcctggcgggcatagcgtatttctctatggtggggaactgggcgaaggtcctgtagtgctgctgctatttgccggcgtcgacgcaaaaacttatgtcaccgggggagctgctgcccacaccacgtccggacttgctgggctcttcttacaaggccccaagcagaacgtccacttgatcaacaccaacggcagtggcacatcaatagtacggccttgaactgcaacgctagccttgacaccggctggatagcagggcttttctattataacaaattcaactcttcaggttgtcccgagaggttggccagctgccgactcctactgattttgaccagggctggggccctatcagtcatgccaacggaagcggccccgaccaacgcccctactgctggcactaccccccaaaaccttgcggcattgtgcccgcgaagagtgtgtgtggcccggtatattgcttcctcccagccctgtggtggtgggaacgaccgacgggtcgggcgtacctacctacaactggggtgaaaatgatacggacgtcttcgtccttaacaacatcaggccaccgctgggtaattggtttggttgacctggatgaactcaactggattcaccaaagtgtgcggggcgcctccttgtgacatcgggggggcgggcaacaacaccttgcactgccccactgattgtttccgcaagcatccggaagccacgtactctcggtgcggctccgtccctggatcacgcccaggtgcctggtccactacccatacaggctttggcattatccctgtaccatcaactacaccatatttaaagtcaggatgtacgtgggagggatcgagcacaggttggaagcgcctgcaactggacgcggggcgagcgttgcgatctggaagacagggacaggtccgagcttagcccgttgctgctgtctaccacacagtggcaagtccttccgtgttccttcacggccatgccagccttgtccaccggcctctccacctccaccagaacattgtggatgtgcagtatttgtacggggtggggtcaagcattgcgtcctgggccattaagtgggagtacgtcgttctcctgttccttttgcttgcagacgcgcgcgtctgtcctgcttgtggatgatgttactcatatcccaagcggaggcggctttggagaaccttgtaatactcaatgcagcatccctggccgggacgcacggtcttgtatccttcctcgtgttcttctgctttgcatggtatctgaaagcaggtgggtgcccggagcggcttacgccttctacgggatgtggcctctcctcctgctcctgctggcgttgccccagcgggcatacgcgctggacacggaggtggccgcgtcgtgtggcggcgttgtcttgtcgggttaatggcgctgactttatcaccacactacaagcgctatatcagctggtgcttatggtggcttcagtattttctgaccagagcggaagcgcagctgcacgtgtgggttccccccctcaacgtccgggggggggtgacgctgtcatcttactcatgtgtgttgtacacccgactctggtattcgacatcaccaaaatgctgctggccgtctatggacccctctggattcttcaagccagtttgcttgaggtaccctacttgtgcgcgtccaaggccttctccggatctgcgcgctagcgcggaagatggtcggaggccattacgtgcaaatggccatcatcaagttaggggcgcttactggcacctatatttataatcatctcacccctcttcaggactggcgcacaacggcctgcgagacctggccgcggctgtagagccagtcgtcttctcccaaatggagaccaagctcatcacgtggggggcagacactgccgcgtgcggtgacattgtcgacggcttacccgttccgcccgtaggggccgggagatactgcttgggccggccgatggaatggtctccaaggggtggaggttgctggcgcccatcacggcgtacgcccagcagacaaggggcctcctagggtgtataatcaccagcctaactggcgggacaaaaaccaagtggaaggtgaggtccagattgtgtcgactgctgcccaaactttcctggcaacgtgcatcaatggggtatgctggactgtctaccacggggccggaacgaggaccatcgcatccccaagggtcctgttatccagatgtataccaatgtagaccaagaccttgtgggctggcccgctcctcaaggtgcccgctcattgacaccctgcacctgcggctcctcggacctttacttggtcacgaggcacgccgatgtcttcccgtgcgccggcggggtgatagcaggggcagcctgctctcgccccggcctatttcctacttgaaaggctcctcgggaggtccgctgttgtgccccgcgggacacgccgtgggcatatttagggcgcggtgtgtacccgtggagtggctaaggcggtggactttatccccgtggagagcctggaaacaaccatgaggtccccggtgtttacggacaactcctccccaccagcggtgccccagaccttccaggtggcccatttgcatctcccacaggcagcggcaagagcaccaaagtcccggctgcatatgcagctcagggttataaggtgctagtgctcaacccctctgtcgctgcaacattgggctttggtgcctacatgtctaaggcccagggatcgatcctaacatcaggaccggggtgaggacaattaccactggcagccccatcacgtactccacctacggtaagttccttgccgacggcgggtgctcagggggcgcttatgacataataatctgtgacgagtgccatccacggatgccacatccatcttgggcatcggcactgtccttgaccaagcagagaccgcgggggcgagactggttgtgctcgccaccgctacccctccgggctctatcactgtgccacatcccaacatgaggaggttgctctgtccaccaccggagagatccctttttacggcaaggccatcccccttgatgtaatcaagggggggagacatctcattttctgtcactcaaagaagaagtgtgacgagcttgccgcaaagctggtcgcatgggcgtcaatgccgtggcctactaccgcggtctcgacgtatctgtcatcccgaccggcggcgatgttgtcgtcgtggcaactgatgctctcatgaccggctttactggcgacttcgactcggtgatgactgcaacacgtgcgtcacccagacagtcgatttcagccttgaccctaccttcaccattgagacaaccacgcttccccaggatgctgtctcccgcactcaacgtcggggcaggactggcagggggaggcaaggcacctacgatttgtggcaccgggggagcgcccctctggcatgttcgactcgtctgtcctctgtgagtgctatgacgcgggctgtgcttggtacgagctcacgcctgccgagaccacagttaggctacgagcgtaatgaacaccccggggcttcccgtgtgtcaagaccatcttgaattttgggagggcgtctttacaggcctcacccatatagatgcccacttcctatcccagacaaaacagagcggggagaatcttccttacctggtagcgtacaagccaccgtgtgcgctagggcgcaagccccccccccatcgtgggaccagatgtggaagtgtttggtccgcctcaaacccaccctccacgggccaacacccctgctatacagactgggtgctgttcaaatgaagtcaccctgacgcacccagtcaccaaatacatcatgacatgtatgtcggctga

SEQ ID NO: 476 - DNA, 4869 bp, Hepatitis C virus
tcgcccacaggacgtcaagttcccgggcggcggccagatcgttggtggagtttacttgttgccgcgcaggggccctagattgggtgtgcgcgcgacgaggaagacttccgagcggtcgcaacctcgagtagacgtcagcctatccccaaggcgcgtcggtccgagggcaggacctgggctcagcccgggtacccttggcccctctatggcaatgagggttgcggatgggcgggatggctcctgtccccccgtggtctcggcctagctggggccccacagacccccggcgtaggtcgcgcaatttgggcaaggtcatcgataccctcacgtgcggcttcgccgacctcatggggtacataccgctcgtcggcgcccctcttgggggcgctgccaggccctggcgcatggagtccgggttctggaagacggcgtgaattatgcaacagggaacctccccggttgctctttctctatcttccttctggccttgctctcttgcctgactgtgcccgcttcagcctacaagtgcgcaactccacggggctttaccatgtcaccaatgattgccctaattcgagtattgtgtacgaggcggccgatgctatcctgcacaccccggggtgtgtcccttgcgttcgtaagggtaacacctcggtgtgttggtggcggtaacccctacggtggccaccagggacggcaaactccccacaacgcagcttcgacgtcatatcgatctgctcgtcgggagtgccaccctctgttcggccctctatgtgggggacctgtgcggtctgtctttcttgttggccaactgtttaccctctctcccagacgccactggacaacgcaaggctgcaattgttccatctatcccggccatataacgggccaccgcatggcatgggatatgatgatgaactggtcccctacgcggcgttggtaatggcacagctgctccggatcccacaagccatcatggacatgatcgctggtgctcactggggagtcctggcgggcatagcgtatttctctatggtggggaactgggcgaaggtcctgtagtgctgctgctatttgccggcgtcgacgcaaaaacttatgtcaccgggggagctgctgcccacaccacgtccggacttgctgggctcttcttacaaggccccaagcagaacgtccacttgatcaacaccaacggcagtggcacatcaatagtacggccttgaactgcaacgctagccttgacaccggctggatagcagggcttttctattacaacaaattcaactcttcaggttgtcccgagaggttggccagctgccgactcctactgattttgaccagggctggggccctatcagtcatgccaacggaagcggccccgaccaacgcccctactgctggcactaccccccaaaaccttgcggcattgtgcccgcgaagagtgtgtgtggcccggtatattgcttcctcccagccctgtggtggtgggaacgaccgacaggtcgggcgaacctacctacaactggggtgaaaatgatacggacgtcttcgtccttaacaacatcaggccaccgctgggtaattggtttggttgacctggatgaactcaaccggattcaccaaagtgtgcggggcgcctccttgtgacatcgggggggcgggcaacaacaccttgcactgccccactgattgtttccgcaagcatccggaagccacgtactctcggtgcggctccgtccctggatcacgcccaggtgcctggtccactacccatacaggctttggcattatccctgtaccatcaactacaccatatttaaagtcaggatgtacgtgggagggatcgagcacaggttggaagcgcctgcaactggacgcggggcgagcgttgcgatctggaagacagggacaggtccgagcttagcccgttgctgctgtctaccacacagtggcaagtccttccgtgttccttcacggccatgccagccttgtccaccggcctctccacctccaccagaacattgtggatgtgcagtatttgtacggggtggggtcaagcattgcgtcctgggccattaagtgggagtacgtcgttctcctgttccttttgcttgcagacgcgcgcgtctgtcctgcttgtggatgatgttactcatatcccaagcggaggcggctttggagaaccttgtaatactcaatgcagcatccctggccgggacgcacggtcttgtatccttcctcgtgttcttctgctttgcatggtatctgaaagcaggtgggtgcccggagcggcttacgccttctacgggatgtggcctctcctcctgctcctgctggcgttgccccagcgggcatacgcgctggacacggaggtggccgcgtcgtgtggcggcgttgtcttgtcgggttaatggcgctgactttatcaccacactacaagcgctatatcagctggtgcttatggtggcttcagtattttctgaccagagcggaagcgcagctgcacgtgtgggttccccccctcaacgtccgggggggggtgacgctgtcatcttactcatgtgtgttgtacacccgactctggtattcgacatcaccaaaatgctgctggccgtctatggacccctctggattcttcaagccagtttgcttgaggtaccctacttgtgcgcgtccaaggccttctccggatctgcgcgctagcgcggaagatggtcggaggccattacgtgcaaatggccatcatcaagttaggggcgcttactggcacctatatttataatcatctcacccctcttcaggactggcgcacaacggcctgcgagacctggccgcggctgtagagccagtcgtcttctcccaaatggagaccaagctcatcacgtggggggcagacactgccgcgtgcggtgacattgtcgacggcttacccgttccgcccgtaggggccgggagatactgcttgggccggccgatggaatggtctccaaggggtggaggttgctggcgcccatcacggcgtacgcccagcagacaaggggcctcctagggtgtataatcaccagcctaactggcgggacaaaaaccaagtggaaggtgaggtccagattgtgtcgactgctgcccaaactttcctggcaacgtgcatcaatggggtatgctggactgtctaccacggggccggaacgaggaccatcgcatccccaagggtcctgttatccagatgtataccaatgtagaccaagaccttgtgggctggcccgctcctcaaggtgcccgctcattgacaccctgcacctgcggctcctcggacctttacttggtcacgaggcacgccgatgtcttcccgtgcgccggcggggtgatagcaggggcagcctgctctcgccccggcctatttcctacttgaaaggctcctcgggaggtccgctgttgtgccccgcgggacacgccgtgggcatatttagggcgcggtgtgtacccgtggagtggctaaggcggtggactttatccccgtggagagcctggaaacaaccatgaggtccccggtgtttacggacaactcctccccaccagcggtgccccagaccttccaggtggcccatttgcatctcccacaggcagcggcaagagcaccaaagtcccggctgcatatgcagctcagggttataaggtgctagtgctcaacccctctgtcgctgcaacattgggctttggtgcctacatgtctaaggcccagggatcgatcctaacatcaggaccggggtgaggacaattaccactggcagccccatcacgtactccacctacggtaagttccttgccgacggcgggtgctcagggggcgcttatgacataataatctgtgacgagtgccatccacggatgccacatccatcttgggcatcggcactgtccttgaccaagcagagaccgcgggggcgagactggttgtgctcgccaccgctacccctccgggctctatcactgtgccacatcccaacatgaggaggttgctctgtccaccaccggagagatccctttttacggcaaggccatcccccttgatgtaatcaagggggggagacatctcattttctgtcactcaaagaagaagtgtgacgagcttgccgcaaagctggtcgcatgggcgtcaatgccgtggcctactaccgcggtctcgacgtatctgtcatcccgaccggcggcgatgttgtcgtcgtggcaactgatgctctcatgaccggctttactggcgacttcgactcggtgatgactgcaacacgtgcgtcacccagacagtcgatttcagccttgaccctaccttcaccattgagacaaccacgcttccccaggatgctgtctcccgcactcaacgtcggggcaggactggcagggggaggcaaggcacctacgatttgtggcaccgggggagcgcccctctggcatgttcgactcgtctgtcctctgtgagtgctatgacgcgggctgtgcttggtacgagctcacgcctgccgagaccacagttaggctacgagcgtaatgaacaccccggggcttcccgtgtgtcaagaccatcttgaattttgggagggcgtctttacaggcctcacccatatagatgcccacttcctatcccagacaaaacagagcggggagaatcttccttacctggtagcgtacaagccaccgtgtgcgctagggcgcaagccccccccccatcgtgggaccagatgtggaagtgtttggtccgcctcaaacccaccctccacgggccaacacccctgctatacagactgggtgctgttcaaatgaagtcaccctgacgcacccagtcaccaaatacatcatgacatgtatgtcggctga

SEQ ID NO: 477 - DNA, 4869 bp, Hepatitis C virus; identical to SEQ ID NO: 458

SEQ ID NO: 478 - DNA, 4869 bp, Hepatitis C virus
tcgcccacaggacgtcaagttcccgggcggcggccagatcgttggtggagtttacttgttgccgcgcaggggccctagattgggtgtgcgcgcgacgaggaagacttccgagcggtcgcaacctcgagtagacgtcagcctatccccaaggcgcgtcggtccgagggcaggacctgggctcagcccgggtacccttggcccctctatggcaatgagggttgcggatgggcgggatggctcctgtccccccgtggtctcggcctagctggggccccacagacccccggcgtaggtcgcgcaatttgggcaaggtcatcgataccctcacgtgcggcttcgccgacctcatggggtacataccgctcgtcggcgcccctcttgggggcgctgccaggccctggcgcatggagtccgggttctggaagacggcgtgaattatgcaacagggaacctccccggttgctctttctctatcttccttctggccttgctctcttgcctgactgtgcccgcttcagcctacaagtgcgcaactccacggggctttaccatgtcaccaatgattgccctaattcgagtattgtgtacgaggcggccgatgctatcctgcacaccccggggtgtgtcccttgcgttcgtaagggtaacacctcggtgtgttggtggcggtaacccctacggtggccaccagggacggcaaactccccacaacgcagcttcgacgtcatatcgatctgctcgtcgggagtgccaccctctgttcggccctctatgtgggggacctgtgcggtctgtctttcttgttggccaactgtttactctctctcccagacgccactggacaacgcaaggctgcaattgttccatctatcccggccatataacgggccaccgcatggcatgggatatgatgatgaactggtcccctacacggcgttggtaatggcacagctgctccggatcccacaagccatcatggacatgatcgctggtgctcactggggagtcctggcgggcatagcgtatttctctatggtggggaactgggcgaaggtcctgtagtgctgctgctatttgccggcgtcgacgcaaaaacttatgtcaccgggggagctgctgcccacaccacgtccggacttgctgggctcttcttacaaggccccaagcagaacgtccacttgatcaacaccaacggcagtggcacatcaatagtacggccttgaactgcaacgctagccttgacaccggctggatagcagggcttttctattacaacaaattcaactcttcaggttgtcccgagaggttggccagctgccgactcctactgattttgaccagggctggggccctatcagtcatgccaacggaagcggccccgaccaacgcccctactgctggcactaccccccaaaaccttgcggcattgtgcccgcgaagagtgtgtgtggcccggtatattgcttcctcccagccctgtggtggtgggaacgaccgacaggtcgggcgaacctacctacaactggggtgaaaatgatacggacgtcttcgtccttaacaacatcaggccaccgctgggtaattggtttggttgacctggatgaactcaactggattcaccaaagtgtgcggggcgcctccttgtgacatcgggggggcgggcaacaacaccttgcactgccccactgattgtttccgcaagcatccggaagccacgtactctcggtgcggctccgtccctggatcacgcccaggtgcctggtccactacccatacaggctttggcattatccctgtaccatcaactacaccatatttaaagtcaggatgtacgtgggagggatcgagcacaggttggaagcgcctgcaactggacgcggggcgagcgttgcgatctggaagacagggacaggtccgagcttagcccgttgctgctgtctaccacacagtggcaagtccttccgtgttccttcacggccatgccagccttgtccaccggcctctccacctccaccagaacattgtggatgtgcagtatttgtacggggtggggtcaagcattgcgtcctgggccattaagtgggagtacgtcgttctcctgttccttttgcttgcagacgcgcgcgtctgtcctgcttgtggatgatgttactcatatcccaagcggaggcggctttggagaaccttgtaatactcaatgcagcatccctggccgggacgcacggtcttgtatccttcctcgtgttcttctgctttgcatggtatctgaaagcaggtgggtgcccggagcggcttacgccttctacgggatgtggcctctcctcctgctcctgctggcgttgccccagcgggcatacgcgctggacacggaggtggccgcgtcgtgtggcggcgttgtcttgtcgggttaatggcgctgactttatcaccacactacaagcgctatatcagctggtgcttatggtggcttcagtattttctgaccagagcggaagcgcagctgcacgtgtgggttccccccctcaacgtccgggggggggtgacgctgtcatcttactcatgtgtgttgtacacccgactctggtattcgacatcaccaaaatgctgctggccgtctatggacccctctggattcttcaagccagtttgcttgaggtaccctacttgtgcgcgtccaaggccttctccggatctgcgcgctagcgcggaagatggtcggaggccattacgtgcaaatggccatcatcaagttaggggcgcttactggcacctatatttataatcatctcacccctcttcaggactggcgcacaacggcctgcgagacctggccgcggctgtagagccagtcgtcttctcccaaatggagaccaagctcatcacgtggggggcagacactgccgcgtgcggtgacattgtcgacggcttacccgttccgcccgtaggggccgggagatactgcttgggccggccgatggaatggtctccaaggggtggaggttgctggcgcccatcacggcgtacgcccagcagacaaggggcctcctagggtgtataatcaccagcctaactggcgggacaaaaaccaagtggaaggtgaggtccagattgtgtcgactgctgcccaaactttcctggcaacgtgcatcaatggggtatgctggactgtctaccacggggccggaacgaggaccatcgcatccccaagggtcctgttatccagatgtataccaatgtagaccaagaccttgtgggctggcccgctcctcaaggtgcccgctcattgacaccctgcacctgcggctcctcggacctttacttggtcacgaggcacgccgatgtcttcccgtgcgccggcggggtgatagcaggggcagcctgctctcgccccggcctatttcctacttgaaaggctcctcgggaggtccgctgttgtgccccgcgggacacgccgtgggcatatttagggcgcggtgtgtacccgtggagtggctaaggcggtggactttatccccgtggagagcctggaaacaaccatgaggtccccggtgtttacggacaactcctccccaccagcggtgccccagaccttccaggtggcccatttgcatctcccacaggcagcggcaagagcaccaaagtcccggctgcatatgcagctcagggttataaggtgctagtgctcaacccctctgtcgctgcaacattgggctttggtgcctacatgtctaaggcccagggatcgatcctaacatcaggaccggggtgaggacaattaccactggcagccccatcacgtactccacctacggtaagttccttgccgacggcgggtgctcagggggcgcttatgacataataatctgtgacgagtgccatccacggatgccacatccatcttgggcatcggcactgtccttgaccaagcagagaccgcgggggcgagactggttgtgctcgccaccgctacccctccgggctctatcactgtgccacatcccaacatgaggaggttgctctgtccaccaccggagagatccctttttacggcaaggccatcccccttgatgtaatcaagggggggagacatctcattttctgtcactcaaagaagaagtgtgacgagcttgccgcaaagctggtcgcatgggcgtcaatgccgtggcctactaccgcggtctcgacgtatctgtcatcccgaccggcggcgatgttgtcgtcgtggcaactgatgctctcatgaccggctttactggcgacttcgactcggtgatgactgcaacacgtgcgtcacccagacagtcgatttcagccttgaccctaccttcaccattgagacaaccacgcttccccaggatgctgtctcccgcactcaacgtcggggcaggactggcagggggaggcaaggcacctacgatttgtggcaccgggggagcgcccctctggcatgttcgactcgtctgtcctctgtgagtgctatgacgcgggctgtgcttggtacgagctcacgcctgccgagaccacagttaggctacgagcgtaatgaacaccccggggcttcccgtgtgtcaagaccatcttgaattttgggagggcgtctttacaggcctcacccatatagatgcccacttcctatcccagacaaaacagagcggggagaatcttccttacctggtagcgtacaagccaccgtgtgcgctagggcgcaagccccccccccatcgtgggaccagatgtggaagtgtttggtccgcctcaaacccaccctccacgggccaacacccctgctatacagactgggtgctgttcaaatgaagtcaccctgacgcacccagtcaccaaatacatcatgacatgtatgtcggctga

SEQ ID NO: 479 - DNA, 4869 bp, Hepatitis C virus; identical to SEQ ID NO: 474

SEQ ID NO: 480 - DNA, 4868 bp, Hepatitis C virus
tcgcccacaggacgtcaagttcccgggcggcggccagatcgttggtggagtttacttgttgccgcgcaggggccctagattgggtgtgcgcgcgacgaggaagacttccgagcggtcgcaacctcgagtagacgtcagcctatccccaaggcgcgtcggtccgagggcaggacctgggctcagcccgggtacccttggcccctctatggcaatgagggttgcggatgggcgggatggctcctgtccccccgtggtctcggcctagctggggccccacagacccccggcgtaggtcgcgcaatttgggcaaggtcatcgataccctcacgtgcggcttcgccgacctcatggggtacataccgctcgtcggcgcccctcttgggggcgctgccaggccctggcgcatggagtccgggttctggaagacggcgtgaattatgcaacagggaacctccccggttgctctttctctatcttccttctggccttgctctcttgcctgactgtgcccgcttcagcctacaagtgcgcaactccacggggctttaccatgtcaccaatgattgccctaattcgagtattgtgtacgaggcggccgatgctatcctgcacaccccggggtgtgtcccttgcgttcgtaagggtaacacctcggtgtgttggtggcggtaacccctacggtggccaccagggacggcaaactccccacaacgcagcttcgacgtcatatcgatctgctcgtcgggagtgccaccctctgttcggccctctatgtgggggacctgtgcggtctgtctttcttgttggccaactgtttaccctctctcccagacgccactggacaacgcaaggctgcaattgttccatctatcccggccatataacgggccaccgcatggcatgggatatgatgatgaactggtcccctacacggcgttggtaatggcacagctgctccggatcccacaagccatcatggacatgatcgctggtgctcactggggagtcctggcgggcatagcgtatttctctatggtggggaactgggcgaaggtcctgtagtgctgctgctatttgccggcgtcgacgcaaaaacttatgtcaccgggggagctgctgcccacaccacgtccggacttgctgggctcttcttacaaggccccaagcagaacgtccacttgatcaacaccaacggcagtggcacatcaatagtacggccttgaactgcaacgctagccttgacaccggctggatagcagggcttttctattataacaaattcaactcttcaggttgtcccgagaggttggccagctgccgactcctactgattttgaccagggctggggccctatcagtcatgccaacggaagcggccccgaccaacgcccctactgctggcactaccccccaaaaccttgcggcattgtgcccgcgaagagtgtgtgtggcccggtatattgcttcctcccagccctgtggtggtgggaacgaccgacgggtcgggcgtacctacctacaactggggtgaaaatgatacggacgtcttcgtccttaacaacatcaggccaccgctgggtaattggtttggttgacctggatgaactcaactggattcaccaaagtgtgcggggcgcctccttgtgacatcgggggggcgggcaacaacaccttgcactgccccactgattgtttccgcaagcatccggaagccacgtactctcggtgcggctccgtccctggatcacgcccaggtgcctggtccactacccatacaggctttggcattatccctgtaccatcaactacaccatatttaaagtcaggatgtacgtgggagggatcgagcacaggttggaagcgcctgcaactggacgcggggcgagcgttgcgatctggaagacagggacaggtccgagcttagcccgttgctgctgtctaccacacagtggcaagtccttccgtgttccttcacggccatgccagccttgtccaccggcctctccacctccaccagaacattgtggatgtgcagtatttgtacggggtggggtcaagcattgcgtcctgggccattaagtgggagtacgtcgttctcctgttccttttgcttgcagacgcgcgcgtctgtcctgcttgtggatgatgttactcatatcccaagcggaggcggctttggagaaccttgtaatactcaatgcagcatccctggccgggacgcacggtcttgtatccttcctcgtgttcttctgctttgcatggtatctgaaagcaggtgggtgcccggagcggcttacgccttctacgggatgtggcctctcctcctgctcctgctggcgttgccccagcgggcatacgcgctggacacggaggtggccgcgtcgtgtggcggcgttgtcttgtcggttaatggcgctgactttatcaccacactacaagcgctatatcagctggtgcttatggtggcttcagtattttctgaccagagcggaagcgcagctgcacgtgtgggttccccccctcaacgtccggggggggctgacgctgtcatcttactcatgtgtgttgtacacccgactctggtattcgacatcaccaaaatgctgctggccgtctatggacccctctggattcttcaagccagtttgcttgaggtaccctacttttgcgcgtccaaggccttctccggatctgcgcgctagcgcggaagatggtcggaggccattacgtgcaaatggccatcatcaagttaggggcgcttactggcacctatatttataatcatctcacccctcttcaggactggggcacaacggcctgcgagacctggccgcggctgtagagccagtcgtcttctcccaaatggagaccaagctcatcacgtggggggcagacactgccgcgtgcggtgacattgtcgacggcttacccgtcccgcccgtaggggccgggagatactgcttgggccggccgatggaatggtctccaaggggtggaggttgctggcgcccatcacggcgtacgcccagcagacaaggggcctcctagggtgtataatcaccagcctaactggccggacaaaaaccaagtggaaggtgaggtccagattgtgtcgactgctgcccaaactttcctggcaacgtgcatcaatggggtatgctggactgtctaccacggggccggaacgaggaccatcgcatcaccaagggtcctgttattcagatgtataccaatgtagaccaagaccttgtgggctggcccgctcctcaaggtgcccgctcattgacaccctgcacctgcggctcctcggacctttacttggtcacgaggcacgccgatgtcatcccgtgcgccggcggggtgatagcaggggcagcctgctctcgccccggcctatttcctacttgaaaggctcctcgggaggtccgctgttgtgccccgcgggacacgccgtgggcatatttagggcccggtgtgtacccgtggagtggctaaggcggtggactttatccccgtggagagcctggaaacaaccatgaggtccccggtgtttacggacaactcctccccaccagcggtgccccagaccttccaggtggcccatttgcatgtcccacaggcagcggcaagagcaccaaagtcccggctgcatatgcagctcagggttataaggtgctagtgctcaacccctctgtcgctgcaacattgggctttggtgcctacatgtctaaggcccatggatcgatcctaacatcaggaccggggtgaggacaattaccactggcagccccatcacgtactccacctacggtaagttccttgccgacggcgggtgctcagggggcgcttatgacataataatctgtgacgagtgccattcacggatgccacatccatcttgggcatcggcactgtccttgaccaagcagagaccgcgggggcgagactggttgtgctcgccaccgctacccctccgggctctatcactgtgccacatcccaacatcaggaggttgctctgtccaccaccggagagatccctttttacggcaaggccatcccccttgatgtaatcaagggggggagacatctcattttctgtcactcaaagaagaagtgtgacgagcttgccgcaaagctggtcgcatgggcgtcaatgccgtggcctactaccgcggtctcgacgtatctgtcatcccgaccggcggcgatgttgtcgtcgtggcaactgatgctctcatgaccggctttactggcgacttcgactcggtgataactgcaacacgtgcgtcacccagacagtcgatttcagccttgaccctaccttcaccattgagacaaccacgcttccccaggatgctgtctcccgcactcaacgtcggggcaggactggcagggggaggcaaggcacctacaatttgtggcaccgggggagcgcccctctggcatgttcgactcgtctgtcctctgtgagtgctatgacgcgggctgtgcttggtacgagctcacgcctgccgagaccacagttaggctacgagcgtattgaacaccccggggcttcccgtgtgtcaagaccatcttgaattttgggagggcgtctttacaggcctcacccatatagatgcccacttcctatcccagacaaaacagagcggggagaatcttccttacctggtagcgtaccagccaccgtgtgcgctagggcgcaagccccccccccatcgtgggaccagatgtggaagtgtttggtccgcctcaaacccaccctccacgggccaacacccctgctatacagactgggtgctgttcaaatgaagtcaccctgacgcacccagtcaccaaatacatcatgacatgtatgtcggctga

SEQ ID NO: 481 - DNA, 4869 bp, Hepatitis C virus
tcgcccacaggacgtcaagttcccgggcggcggccagatcgttggtggagtttacttgttgccgcgcaggggccctagattgggtgtgcgcgcgacgaggaagacttccgagcggtcgcaacctcgagtagacgtcagcctatccccaaggcgcgtcggtccgagggcaggacctgggctcagcccgggtacccttggcccctctatggcaatgagggttgcggatgggcgggatggctcctgtccccccgtggtctcggcctagctggggccccacagacccccggcgtaggtcgcgcaatttgggcaaggtcatcgataccctcacgtgcggcttcgccgacctcatggggtacataccgctcgtcggcgcccctcttgggggcgctgccaggccctggcgcatggagtccgggttctggaagacggcgtgaattatgcaacagggaacctccccggttgctctttctctatcttccttctggccttgctctcttgcctgactgtgcccgcttcagcctacaagtgcgcaactccacggggctttaccatgtcaccaatgattgccctaattcgagtattgtgtacgaggcggccgatgctatcctgcacaccccggggtgtgtcccttgcgttcgtaagggtaacacctcggtgtgttggtggcggtaacccctacggtggccaccagggacggcaaactccccacaacgcagcttcgacgtcatatcgatctgctcgtcgggagtgccaccctctgttcggccctctatgtgggggacctgtgcggtctgtctttcttgttggccaactgtttaccctctctcccagacgccactggacaacgcaaggctgcaattgttccatctatcccggccatataacgggccaccgcatggcatgggatatgatgatgaactggtcccctacacggcgttggtaatggcacagctgctccggatcccacaagccatcatggacatgatcgctggtgctcactggggagtcctggcgggcatagcgtatttctctatggtggggaactgggcgaaggtcctgtagtgctgctgctatttgccggcgtcgacgcaaaaacttatgtcaccgggggagctgctgcccacaccacgtccggacttgctgggctcttcttacaaggccccaagcagaacgtccacttgatcaacaccaacggcagtggcacatcaatagtacggccttgaactgcaacgctagccttgacaccggctggatagcagggcttttctattacaacaaattcaactcttcaggttgtcccgagaggttggccagctgccgactcctactgattttgaccagggctggggccctatcagtcatgccaacggaagcggccccgaccaacgcccctactgctggcactaccccccaaaaccttgcggcattgtgcccgcgaagagtgtgtgtggcccggtatattgcttcctctcagccctgtggtggtgggaacgaccgacaggtcgggcgaacctacctacaactggggtgaaaatgatacggacgtcttcgtccttaacaacatcaggccaccgctgggtaattggtttggttgacctggatgaactcaaccggattcaccaaagtgtgcggggcgcctccttgtgacatcgggggggcgggcaacaacaccttgcactgccccactgattgtttccgcaagcatccggaagccacgtactctcggtgcggctccgtccctggatcacgcccaggtgcctggtccactacccatacaggctttggcattatccctgtaccatcaactacaccatatttaaagtcaggatgtacgtgggagggatcgagcacaggttggaagcgcctgcaactggacgcggggcgagcgttgcgatctggaagacagggacaggtccgagcttagcccgttgctgctgtctaccacacagtggcaagtccttccgtgttccttcacggccatgccagccttgtccaccggcctctccacctccaccagaacattgtggatgtgcagtatttgtacggggtggggtcaagcattgcgtcctgggccattaagtgggagtacgtcgttctcctgttccttttgcttgcagacgcgcgcgtctgtcctgcttgtggatgatgttactcatatcccaagcggaggcggctttggagaaccttgtaatactcaatgcagcatccctggccgggacgcacggtcttgtatccttcctcgtgttcttctgctttgcatggtatctgaaagcaggtgggtgcccggagcggcttacgccttctacgggatgtggcctctcctcctgctcctgctggcgttgccccagcgggcatacgcgctggacacggaggtggccgcgtcgtgtggcggcgttgtcttgtcgggttaatggcgctgactttatcaccacactacaagcgctatatcagctggtgcttatggtggcttcagtattttctgaccagagcggaagcgcagctgcacgtgtgggttccccccctcaacgtccgggggggggtgacgctgtcatcttactcatgtgtgttgtacacccgactctggtattcgacatcaccaaaatgctgctggccgtctatggacccctctggattcttcaagccagtttgcttgaggtaccctacttgtgcgcgtccaaggccttctccggatctgcgcgctagcgcggaagatggtcggaggccattacgtgcaaatggccatcatcaagttaggggcgcttactggcacctatatttataatcatctcacccctcttcaggactggcgcacaacggcctgcgagacctggccgcggctgtagagccagtcgttttctcccaaatggagaccaagctcatcacgtggggggcagacactgccgcgtgcggtgacattgtcgacggcttacccgttccgcccgtaggggccgggagatactgcttgggccggccgatggaatggtctccaaggggtggaggttgctggcgcccatcacggcgtacgcccagcagacaaggggcctcctagggtgtataatcaccagcctaactggcgggacaaaaaccaagtggaaggtgaggtccagattgtgtcgactgctgcccaaactttcctggcaacgtgcatcaatggggtatgctggactgtctaccacggggccggaacgaggaccatcgcatccccaagggtcctgttatccagatgtataccaatgtagaccaagaccttgtgggctggcccgctcctcaaggtgcccgctcattgacaccctgcacctgcggctcctcggacctttacttggtcacgaggcacgccgatgtcttcccgtgcgccggcggggtgatagcaggggcagcctgctctcgccccggcctatttcctacttgaaaggctcctcgggaggtccgctgttgtgccccgcgggacacgccgtgggcatatttagggcgcggtgtgtacccgtggagtggctaaggcggtggactttatccccgtggagagcctggaaacaaccatgaggtccccggtgtttacggacaactcctccccaccagcggtgccccagaccttccaggtggcccatttgcatctcccacaggcagcggcaagagcaccaaagtcccggctgcatatgcagctcagggttataaggtgctagtgctcaacccctctgtcgctgcaacattgggctttggtgcctacatgtctaaggcccagggatcgatcctaacatcaggaccggggtgaggacaattaccactggcagccccatcacgtactccacctacggtaagttccttgccgacggcgggtgctcagggggcgcttatgacataataatctgtgacgagtgccatccacggatgccacatccatcttgggcatcggcactgtccttgaccaagcagagaccgcgggggcgagactggttgtgctcgccaccgctacccctccgggctctatcactgtgccacatcccaacatgaggaggttgctctgtccaccaccggagagatccctttttacggcaaggccatcccccttgatgtaatcaagggggggagacatctcattttctgtcactcaaagaagaagtgtgacgagcttgccgcaaagctggtcgcatgggcgtcaatgccgtggcctactaccgcggtctcgacgtatctgtcatcccgaccggcggcgatgttgtcgtcgtggcaactgatgctctcatgaccggctttactggcgacttcgactcggtgatgactgcaacacgtgcgtcacccagacagtcgatttcagccttgaccctaccttcaccattgagacaaccacgcttccccaggatgctgtctcccgcactcaacgtcggggcaggactggcagggggaggcaaggcacctacgatttgtggcaccgggggagcgcccctctggcatgttcgactcgtctgtcctctgtgagtgctatgacgcgggctgtgcttggtacgagctcacgcctgccgagaccacagttaggctacgagcgtaatgaacaccccggggcttcccgtgtgtcaagaccatcttgaattttgggagggcgtctttacaggcctcacccatatagatgcccacttcctatcccagacaaaacagagcggggagaatcttccttacctggtagcgtacaagccaccgtgtgcgctagggcgcaagccccccccccatcgtgggaccagatgtggaagtgtttggtccgcctcaaacccaccctccacgggccaacacccctgctatacagactgggtgctgttcaaatgaagtcaccctgacgcacccagtcaccaaatacatcatgacatgtatgtcggctga

SEQ ID NO: 482 - DNA, 4869 bp, Hepatitis C virus
tcgcccacaggacgtcaagttcccgggcggcggccagatcgttggtggagtttacttgttgccgcgcaggggccctagattgggtgtgcgcgcgacgaggaagacttccgagcggtcgcaacctcgagtagacgtcagcctatccccaaggcgcgtcggtccgagggcaggacctgggctcagcccgggtacccttggcccctctatggcaatgagggttgcggatgggcgggatggctcctgtccccccgtggtctcggcctagctggggccccacagacccccggcgtaggtcgcgcaatttgggcaaggtcatcgataccctcacgtgcggcttcgccgacctcatggggtacataccgctcgtcggcgcccctcttgggggcgctgccaggccctggcgcatggagtccgggttctggaagacggcgtgaattatgcaacagggaacctccccggttgctctttctctatcttccttctggccttgctctcttgcctgactgtgcccgcttcagcctacaagtacgcaactccacggggctttaccatgtcaccaatgattgccctaattcgagtattgtgtacgaggcggccgatgctatcctgcacaccccggggtgtgtcccttgcgttcgtaagggtaacacctcggtgtgttggtggcggtaacccctacggtggccaccagggacggcaaactccccacaacgcagcttcgacgtcatatcgatctgctcgtcgggagtgccaccctctgttcggccctctatgtgggggacctgtgcggtctgtctttcttgttggccaactgtttaccctctctcccagacgccactggacaacgcaaggctgcaattgttccatctatcccggccatataacgggccaccgcatggcatgggatatgatgatgaactggtcccctacacggcgttggtaatggcacagctgctccggatcccacaagccatcatggacatgatcgctggtgctcactggggagtcctggcgggcatagcgtatttctctatggtggggaactgggcgaaggtcctgtagtgctgctgctatttgccggcgtcgacgcaaaaacttatgtcaccgggggagctgctgcccacaccacgtccggacttgctgggctcttcttacaaggccccaagcagaacgtccacttgatcaacaccaacggcagtggcacatcaatagtacggccttgaactgcaacgctagccttgacaccggctggatagcagggcttttctattacaacaaattcaactcttcaggttgtcccgagaggttggccagctgccgactcctactgattttgaccagggctggggccctatcagtcatgccaacggaagcggccccgaccaacgcccctactgctggcactaccccccaaaaccttgcggcattgtgcccgcgaagagtgtgtgtggcccggtatattgcttcctcccagccctgtggtggtgggaacgaccgacaggtcgggcgaacctacctacaactggggtgaaaatgatacggacgtcttcgtccttaacaacatcaggccaccgctgggtaattggtttggttgacctggatgaactcaaccggattcaccaaagtgtgcggggcgcctccttgtgacatcgggggggcgggcaacaacaccttgcactgccccactgattgtttccgcaagcatccggaagccacgtactctcggtgcggctccgtccctggatcacgcccaggtgcctggtccactacccatacaggctttggcattatccctgtaccatcaactacaccatatttaaagtcaggatgtacgtgggagggatcgagcacaggttggaagcgcctgcaactggacgcggggcgagcgttgcgatctggaagacagggacaggtccgagcttagcccgttgctgctgtctaccacacagtggcaagtccttccgtgttccttcacggccatgccagccttgtccaccggcctctccacctccaccagaacattgtggatgtgcagtatttgtacggggtggggtcaagcattgcgtcctgggccattaagtgggagtacgtcgttctcctgttccttttgcttgcagacgcgcgcgtctgtcctgcttgtggatgatgttactcatatcccaagcggaggcggctttggagaaccttgtaatactcaatgcagcatccctggccgggacgcacggtcttgtatccttcctcgtgttcttctgctttgcatggtatctgaaagcaggtgggtgcccggagcggcttacgccttctacgggatgtggcctctcctcctgctcctgctggcgttgccccagcgggcatacgcgctggacacggaggtggccgcgtcgtgtggcggcgttgtcttgtcgggttaatggcgctgactttatcaccacactacaagcgctatatcagctggtgcttatggtggcttcagtattttctgaccagagcggaagcgcagctgcacgtgtgggttccccccctcaacgtccgggggggggtgacgctgtcatcttactcatgtgtgttgtacacccgactctggtattcgacatcaccaaaatgctgctggccgtctatggacccctctggattcttcaagccagtttgcttgaggtaccctacttgtgcgcgtccaaggccttctccggatctgcgcgctagcgcggaagatggtcggaggccattacgtgcaaatggccatcatcaagttaggggcgcttactggcacctatatttataatcatctcacccctcttcaggactggcgcacaacggcctgcgagacctggccgcggctgtagagccagtcgtcttctcccaaatggagaccaagctcatcacgtggggggcagacactgccgcgtgcggtgacattgtcgacggcttacccgttccgcccgtaggggccgggagatactgcttgggccggccgatggaatggtctccaaggggtggaggttgctggcgcccatcacggcgtacgcccagcagacaaggggcctcctagggtgtataatcaccagcctaactggcgggacaaaaaccaagtggaaggtgaggtccagattgtgtcgactgctgcccaaactttcctggcaacgtgcatcaatggggtatgctggactgtctaccacggggccggaacgaggaccatcgcatccccaagggtcctgttatccagatgtataccaatgtagaccaagaccttgtgggctggcccgctcctcaaggtgcccgctcattgacaccctgcacctgcggctcctcggacctttacttggtcacgaggcacgccgatgtcttcccgtgcgccggcggggtgatagcaggggcagcctgctctcgccccggcctatttcctacttgaaaggctcctcgggaggtccgctgttgtgccccgcgggacacgccgtgggcatatttagggcgcggtgtgtacccgtggagtggctaaggcggtggactttatccccgtggagagcctggaaacaaccatgaggtccccggtgtttacggacaactcctccccaccagcggtgccccagaccttccaggtggcccatttgcatctcccacaggcagcggcaagagcaccaaagtcccggctgcatatgcagctcagggttataaggtgctagtgctcaacccctctgtcgctgcaacattgggctttggtgcctacatgtctaaggcccagggatcgatcctaacatcaggaccggggtgaggacaattaccactggcagccccatcacgtactccacctacggtaagttccttgccgacggcgggtgctcagggggcgcttatgacataataatctgtgacgagtgccatccacggatgccacatccatcttgggcatcggcactgtccttgaccaagcagagaccgcgggggcgagactggttgtgctcgccaccgctacccctccgggctctatcactgtgccacatcccaacatgaggaggttgctctgtccaccaccggagagatccctttttacggcaaggccatcccccttgatgtaatcaagggggggagacatctcattttctgtcactcaaagaagaagtgtgacgagcttgccgcaaagctggtcgcatgggcgtcaatgccgtggcctactaccgcggtctcgacgtatctgtcatcccgaccggcggcgatgttgtcgtcgtggcaactgatgctctcatgaccggctttactggcgacttcgactcggtgatgactgcaacacgtgcgtcacccagacagtcgatttcagccttgaccctaccttcaccattgagacaaccacgcttccccaggatgctgtctcccgcactcaacgtcggggcaggactggcagggggaggcaaggcacctacgatttgtggcaccgggggagcgcccctctggcatgttcgactcgtctgtcctctgtgagtgctatgacgcgggctgtgcttggtacgagctcacgcctgccgagaccacagttaggctacgagcgtaatgaacaccccggggcttcccgtgtgtcaagaccatcttgaattttgggagggcgtctttacaggcctcacccatatagatgcccacttcctatcccagacaaaacagagcggggagaatcttccttacctggtagcgtacaagccaccgtgtgcgctagggcgcaagccccccccccatcgtgggaccagatgtggaagtgtttggtccgcctcaaacccaccctccacgggccaacacccctgctatacagactgggtgctgttcaaatgaagtcaccctgacgcacccagtcaccaaatacatcatgacatgtatgtcggctga

SEQ ID NO: 483 - DNA, 4869 bp, Hepatitis C virus
tcgcccacaggacgtcaagttcccgggcggcggccagatcgttggtggagtttacttgttgccgcgcaggggccctagattgggtgtgcgcgcgacgaggaagacttccgagcggtcgcaacctcgagtagacgtcagcctatccccaaggcgcgtcggtccgagggcaggacctgggctcagcccgggtacccttggcccctctatggcaatgagggttgcggatgggcgggatggctcctgtccccccgtggtctcggcctagctggggccccacagacccccggcgtaggtcgcgcaatttgggcaaggtcatcgataccctcacgtgcggcttcgccgacctcatggggtacataccgctcgtcggcgcccctcttgggggcgctgccaggccctggcgcatggagtccgggttctggaagacggcgtgaattatgcaacagggaacctccccggttgctctttctctatcttccttctggccttgctctcttgcctgactgtgcccgcttcagcctacaagtgcgcaactccacggggctttaccatgtcaccaatgattgccctaattcgagtattgtgtacgaggcggccgatgctatcctgcacaccccggggtgtgtcccttgcgttcgtaagggtaacacctcggtgtgttggtggcggtaacccctacggtggccaccagggacggcaaactccccacaacgcagcttcgacgtcatatcgatctgctcgtcgggagtgccaccctctgttcggccctctatgtgggggacctgtgcggtctgtctttcttgttggccaactgtttaccctctctcccagacgccactggacaacgcaaggctgcaattgttccatctatcccggccatataacgggccaccgcatggcatgggatatgatgatgaactggtcccctacacggcgttggtaatggcacagctgctccggatcccacaagccatcatggacatgatcgctggtgctcactggggagtcctggcgggcatagcgtatttctctatggtggggaactgggcgaaggtcctgtagtgctgctgctatttgccggcgtcgacgcaaaaacttatgtcaccgggggagctgctgcccacaccacgtccggacttgctgggctcttcttacaaggccccaagcagaacgtccacttgatcaacaccaacggcagtggcacatcaatagtacggccttgaactgcaacgctagccttgacaccggctggatagcagggcttttctattacaacaaattcaactcttcaggttgtcccgagaggttggccagctgccgactcctactgattttgaccagggctggggccctatcagtcatgccaacggaagcggccccgaccaacgcccctactgctggcactaccccccaaaaccttgcggcattgtgcccgcgaagagtgtgtgtggcccggtatattgcttcctcccagccctgtggtggtgggaacgaccgacaggtcgggcgaacctacctacaactggggtgaaaatgatacggacgtcttcgtccttaacaacatcaggccaccgctgggtaattggtttggttgacctggatgaactcaaccggattcaccaaagtgtgcggggcgcctccttgtgacatcgggggggcgggcaacaacaccttgcactgccccactgattgtttccgcaagcatccggaagccacgtactctcggtgcggctccgtccctggatcacgcccaggtgcctggtccactacccatacaggctttggcattatccctgtaccatcaactacaccatatttaaagtcaggatgtacgtgggagggatcgagcacaggttggaagcgcctgcaactggacgcggggcgagcgttgcgatctggaagacagggacaggtccgagcttagcccgttgctgctgtctaccacacagtggcaagtccttccgtgttccttcacggccatgccagccttgtccaccggcctctccacctccaccagaacattgtggatgtgcagtatttgtacggggtggggtcaagcattgcgtcctgggccattaagtgggagtacgtcgttctcctgttccttttgcttgcagacgcgcgcgtctgtcctgcttgtggatgatgttactcatatcccaagcggaggcggctttggagaaccttgtaatactcaatgcagcatccctggccgggacgcacggtcttgtatccttcctcgtgttcttctgctttgcatggtatctgaaagcaggtgggtgcccggagcggcttacgccttctacgggatgtggcctctcctcctgctcctgctggcgttgccccagcgggcatacgcgctggacacggaggtggccgcgtcgtgtggcggcgttgtcttgtcgggttaatggcgctgactttatcaccacactacaagcgctatatcagctggtgcttatggtggcttcagtattttctgaccagagcggaagcgcagctgcacgtgtgggttccccccctcaacgtccgggggggggtgacgctgtcatcttactcatgtgtgttgtacacccgactctggtattcgacatcaccaaaatgctgctggccgtctatggacccctctggattcttcaagccagtttgcttgaggtaccctacttgtgcgcgtccaaggccttctccggatctgcgcgctagcgcggaagatggtcggaggccattacgtgcaaatggccatcatcaagttaggggcgcttactggcacctatatttataatcatctcacccctcttcaggactggcgcacaacggcctgcgagacctggccgcggctgtagagccagtcgttttctcccaaatggagaccaagctcatcacgtggggggcagacactgccgcgtgcggtgacattgtcgacggcttacccgttccgcccgtaggggccgggagatactgcttgggccggccgatggaatggtctccaaggggtggaggttgctggcgcccatcacggcgtacgcccagcagacaaggggcctcctagggtgtataatcaccagcctaactggcgggacaaaaaccaagtggaaggtgaggtccagattgtgtcgactgctgcccaaactttcctggcaacgtgcatcaatggggtatgctggactgtctaccacggggccggaacgaggaccatcgcatccccaagggtcctgttatccagatgtataccaatgtagaccaagaccttgtgggctggcccgctcctcaaggtgcccgctcattgacaccctgcacctgcggctcctcggacctttacttggtcacgaggcacgccgatgtcttcccgtgcgccggcggggtgatagcaggggcagcctgctctcgccccggcctatttcctacttgaaaggctcctcgggaggtccgctgttgtgccccgcgggacacgccgtgggcatatttagggcgcggtgtgtacccgtggagtggctaaggcggtggactttatccccgtggagagcctggaaacaaccatgaagtccccggtgtttacggacaactcctccccaccagcggtgccccagaccttccaggtggcccatttgcatctcccacaggcagcggcaagagcaccaaagtcccggctgcatatgcagctcagggttataaggtgctagtgctcaacccctctgtcgctgcaacattgggctttggtgcctacatgtctaaggcccagggatcgatcctaacatcaggaccggggtgaggacaattaccactggcagccccatcacgtactccacctacggtaagttccttgccgacggcgggtgctcagggggcgcttatgacataataatctgtgacgagtgccatccacggatgccacatccatcttgggcatcggcactgtccttgaccaagcagagaccgcgggggcgagactggttgtgctcgccaccgctacccctccgggctctatcactgtgccacatcccaacatgaggaggttgctctgtccaccaccggagagatccctttttacggcaaggccatcccccttgatgtaatcaagggggggagacatctcattttctgtcactcaaagaagaagtgtgacgagcttgccgcaaagctggtcgcatgggcgtcaatgccgtggcctactaccgcggtctcgacgtatctgtcatcccgaccggcggcgatgttgtcgtcgtggcaactgatgctctcatgaccggctttactggcgacttcgactcggtgatgactgcaacacgtgcgtcacccagacagtcgatttcagccttgaccctaccttcaccattgagacaaccacgcttccccaggatgctgtctcccgcactcaacgtcggggcaggactggcagggggaggcaaggcacctacgatttgtggcaccgggggagcgcccctctggcatgttcgactcgtctgtcctctgtgagtgctatgacgcgggctgtgcttggtacgagctcacgcctgccgagaccacagttaggctacgagcgtaatgaacaccccggggcttcccgtgtgtcaagaccatcttgaattttgggagggcgtctttacaggcctcacccatatagatgcccacttcctatcccagacaaaacagagcggggagaatcttccttacctggtagcgtacaagccaccgtgtgcgctagggcgcaagccccccccccatcgtgggaccagatgtggaagtgtttggtccgcctcaaacccaccctccacgggccaacacccctgctatacagactgggtgctgttcaaatgaagtcaccctgacgcacccagtcaccaaatacatcatgacatgtatgtcggctga

SEQ ID NO: 484 - DNA, 4869 bp, Hepatitis C virus; identical to SEQ ID NO: 474

SEQ ID NO: 485 - DNA, 4869 bp, Hepatitis C virus
tcgcccacaggacgtcaagttcccgggcggcggccagatcgttggtggagtttacttgttgccgcgcaggggccctagattgggtgtgcgcgcgacgaggaagacttccgagcggtcgcaacctcgagtagacgtcagcctatccccaaggcgcgtcggtccgagggcaggacctgggctcagcccgggtacccttggcccctctatggcaatgagggttgcggatgggcgggatggctcctgtccccccgtggtctcggcctagctggggccccacagacccccggcgtaggtcgcgcaatttgggcaaggtcatcgataccctcacgtgcggcttcgccgacctcatggggtacataccgctcgtcggcgcccctcttgggggcgctgccaggccctggcgcatggagtccgggttctggaagacggcgtgaattatgcaacagggaacctccccggttgctctttctctatcttccttctggccttgctctcttgcctgactgtgcccgcttcagcctacaagtgcgcaactccacggggctttaccatgtcaccaatgattgccctaattcgagtattgtgtacgaggcggccgatgctatcctgcacaccccggggtgtgtcccttgcgttcgtaagggtaacacctcggtgtgttggtggcggtaacccctacggtggccaccagggacggcaaactccccacaacgcagcttcgacgtcatatcgatctgctcgtcgggagtgccaccctctgttcggccctctatgtgggggacctgtgcggtctgtctttcttgttggccaactgtttaccctctctcccagacgccactggacaacgcaaggctgcaattgttccatctatcccggccatataacgggccaccgcatggcatgggatatgatgatgaactggtcccctacacggcgttggtaatggcacagctgctccggatcccacaagccatcatggacatgatcgctggtgctcactggggagtcctggcgggcatagcgtatttctctatggtggggaactgggcgaaggtcctgtagtgctgctgctatttgccggcgtcgacgcaaaaacttatgtcaccgggggagctgctgcccacaccacgtccggacttgctgggctcttcttacaaggccccaagcagaacgtccacttgatcaacaccaacggcagtggcacatcaatagtacggccttgaactgcaacgctagccttgacaccggctggatagcagggcttttctattacaacaaattcaactcttcaggttgtcccgagaggttggccagctgccgactcctactgattttgaccagggctggggccctatcagtcatgccaacggaagcggccccgaccaacgcccctactgctggcactaccccccaaaaccttgcggcattgtgcccgcgaagagtgtgtgtggcccggtatattgcttcctcccagccctgtggtggtgggaacgaccgacaggtcgggcgaacctacctacaactggggtgaaaatgatacggacgtcttcgtccttaacaacatcaggccaccgctgggtaattggtttggttgacctggatgaactcaactggattcaccaaggtgtgcggggcgcctccttgtgacatcgggggggcgggcaacaacaccttgcactgccccactgattgtttccgcaagcatccggaagccacgtactctcggtgcggctccgtccctggatcacgcccaggtgcctggtccactacccatacaggctttggcattatccctgtaccatcaactacaccatatttaaagtcaggatgtacgtgggagggatcgagcacaggttggaagcgcctgcaactggacgcggggcgagcgttgcgatctggaagacagggacaggtccgagcttagcccgttgctgctgtctaccacacagtggcaagtccttccgtgttccttcacggccatgccagccttgtccaccggcctctccacctccaccagaacattgtggatgtgcagtatttgtacggggtggggtcaagcattgcgtcctgggccattaagtgggagtacgtcgttctcctgttccttttgcttgcagacgcgcgcgtctgtcctgcttgtggatgatgttactcatatcccaagcggaggcggctttggagaaccttgtaatactcaatgcagcatccctggccgggacgcacggtcttgtatccttcctcgtgttcttctgctttgcatggtatctgaaagcaggtgggtgcccggagcggcttacgccttctacgggatgtggcctctcctcctgctcctgctggcgttgccccagcgggcatacgcgctggacacggaggtggccgcgtcgtgtggcggcgttgtcttgtcgggttaatggcgctgactttatcaccacactacaagcgctatatcagctggtgcttatggtggcttcagtattttctgaccagagcggaagcgcagctgcacgtgtgggttccccccctcaacgtccgggggggggtgacgctgtcatcttactcatgtgtgttgtacacccgactctggtattcgacatcaccaaaatgctgctggccgtctatggacccctctggattcttcaagccagtttgcttgaggtaccctacttgtgcgcgtccaaggccttctccggatctgcgcgctagcgcggaagatggtcggaggccattacgtgcaaatggccatcatcaagttaggggcgcttactggcacctatatttataatcatctcacccctcttcaggactggcgcacaacggcctgcgagacctggccgcggctgtagagccagtcgtcttctcccaaatggagaccaagctcatcacgtggggggcagacactgccgcgtgcggtgacattgtcgacggcttacccgttccgcccgtaggggccgggagatactgcttgggccggccgatggaatggtctccaaggggtggaggttgctggcgcccatcacggcgtacgcccagcagacaaggggcctcctagggtgtataatcaccagcctaactggcgggacaaaaaccaagtggaaggtgaggtccagattgtgtcgactgctgcccaaactttcctggcaacgtgcatcaatggggtatgctggactgtctaccacggggccggaacgaggaccatcgcatccccaagggtcctgttatccagatgtataccaatgtagaccaagaccttgtgggctggcccgctcctcaaggtgcccgctcattgacaccctgcacctgcggctcctcggacctttacttggtcacgaggcacgccgatgtcttcccgtgcgccggcggggtgatagcaggggcagcctgctctcgccccggcctatttcctacttgaaaggctcctcgggaggtccgctgttgtgccccgcgggacacgccgtgggcatatttagggcgcggtgtgtacccgtggagtggctaaggcggtggactttatccccgtggagagcctggaaacaaccatgaggtccccggtgtttacggacaactcctccccaccagcggtgccccagaccttccaggtggcccatttgcatctcccacaggcagcggcaagagcaccaaagtcccggctgcatatgcagctcagggttataaggtgctagtgctcaacccctctgtcgctgcaacattgggctttggtgcctacatgtctaaggcccagggatcgatcctaacatcaggaccggggtgaggacaattaccactggcagccccatcacgtactccacctacggtaagttccttgccgacggcgggtgctcagggggcgcttatgacataataatctgtgacgagtgccatccacggatgccacatccatcttgggcatcggcactgtccttgaccaagcagagaccgcgggggcgagactggttgtgctcgccaccgctacccctccgggctctatcactgtgccacatcccaacatgaggaggttgctctgtccaccaccggagagatccctttttacggcaaggccatcccccttgatgtaatcaagggggggagacatctcattttctgtcactcaaagaagaagtgtgacgagcttgccgcaaagctggtcgcatgggcgtcaatgccgtggcctactaccgcggtctcgacgtatctgtcatcccgaccggcggcgatgttgtcgtcgtggcaactgatgctctcatgaccggctttactggcgacttcgactcggtgatgactgcaacacgtgcgtcacccagacagtcgatttcagccttgaccctaccttcaccattgagacaaccacgcttccccaggatgctgtctcccgcactcaacgtcggggcaggactggcagggggaggcaaggcacctacgatttgtggcaccgggggagcgcccctctggcatgttcgactcgtctgtcctctgtgagtgctatgacgcgggctgtgcttggtacgagctcacgcctgccgagaccacagttaggctacgagcgtaatgaacaccccggggcttcccgtgtgtcaagaccatcttgaattttgggagggcgtctttacaggcctcacccatatagatgcccacttcctatcccagacaaaacagagcggggagaatcttccttacctggtagcgtacaagccaccgtgtgcgctagggcgcaagccccccccccatcgtgggaccagatgtggaagtgtttggtccgcctcaaacccaccctccacgggccaacacccctgctatacagactgggtgctgttcaaatgaagtcaccctgacgcacccagtcaccaaatacatcatgacatgtatgtcggctga

SEQ ID NO: 486 - DNA, 4869 bp, Hepatitis C virus
tcgcccacaggacgtcaagttcccgggcggcggccagatcgttggtggagtttacttgttgccgcgcaggggccctagattgggtgtgcgcgcgacgaggaagacttccgagcggtcgcaacctcgagtagacgtcagcctatccccaaggcgcgtcggcccgagggcaggacctgggctcagcccgggtacccttggcccctctatggcaatgagggttgcggatgggcgggatggctcctgtccccccgtggtctcggcctagctggggccccacagacccccggcgtaggtcgcgcaatttgggcaaggtcatcgataccctcacgtgcggcttcgccgacctcatggggtacataccgctcgtcggcgcccctcttgggggcgctgccaggccctggcgcatggagtccgggttctggaagacggcgtgaattatgcaacagggaacctccccggttgctctttctctatcttccttctggccttgctctcttgcctgactgtgcccgcttcagcctacaagtgcgcaactccacggggctttaccatgtcaccaatgattgccctaattcgagtattgtgtacgaggcggccgatgctatcctgcacaccccggggtgtgtcccttgcgttcgtaagggtaacacctcggtgtgttggtggcggtaacccctacggtggccaccagggacggcaaactccccacaacgcagcttcgacgtcatatcgatctgctcgtcgggagtgccaccctctgttcggccctctatgtgggggacctgtgcggtctgtctttcttgttggccaactgtttaccctctctcccagacgccactggacaacgcaaggctgcaattgttccatctatcccggccatataacgggccaccgcatggcatgggatatgatgatgaactggtcccctacacggcgttggtaatggcacagctgctccggatcccacaagccatcatggacatgatcgctggtgctcactggggagtcctggcgggcatagcgtatttctctatggtggggaactgggcgaaggtcctgtagtgctgctgctatttgccggcgtcgacgcaaaaacttatgtcaccgggggagctgctgcccacaccacgtccggacttgctgggctcttcttacaaggccccaagcagaacgtccacttgatcaacaccaacggcagtggcacatcaatagtacggccttgaactgcaacgctagccttgacaccggctggatagcagggcttttctattacaacaaattcaactcttcaggttgtcccgagaggttggccagctgccgactcctactgattttgaccagggctggggccctatcagtcatgccaacggaagcggccccgaccaacgcccctactgctggcactaccccccaaaaccttgcggcattgtgcccgcgaagagtgtgtgtggcccggtatattgcttcctcccagccctgtggtggtgggaacgaccgacaggtcgggcgaacctacctacaactggggtgaaaatgatacggacgtcttcgtccttaacaacatcaggccaccgctgggtaattggtttggttgacctggatgaactcaaccggattcaccaaagtgtgcggggcgcctccttgtgacatcgggggggcgggcaacaacaccttgcactgccccactgattgtttccgcaagcatccggaagccacgtactctcggtgcggctccgtccctggatcacgcccaggtgcctggtccactacccatacaggctttggcattatccctgtaccatcaactacaccatatttaaagtcaggatgtacgtgggagggatcgagcacaggttggaagcgcctgcaactggacgcggggcgagcgttgcgatctggaagacagggacaggtccgagcttagcccgttgctgctgtctaccacacagtggcaagtccttccgtgttccttcacggccatgccagccttgtccaccggcctctccacctccaccagaacattgtggatgtgcagtatttgtacggggtggggtcaagcattgcgtcctgggccattaagtgggagtacgtcgttctcctgttccttttgcttgcagacgcgcgcgtctgtcctgcttgtggatgatgttactcatatcccaagcggaggcggctttggagaaccttgtaatactcaatgcagcatccctggccgggacgcacggtcttgtatccttcctcgtgttcttctgctttgcatggtatctgaaagcaggtgggtgcccggagcggcttacgccttctacgggatgtggcctctcctcctgctcctgctggcgttgccccagcgggcatacgcgctggacacggaggtggccgcgtcgtgtggcggcgttgtcttgtcgggttaatggcgctgactttatcaccacactacaagcgctatatcagctggtgcttatggtggcttcagtattttctgaccagagcggaagcgcagctgcacgtgtgggttccccccctcaacgtccgggggggggtgacgctgtcatcttactcatgtgtgttgtacacccgactctggtattcgacatcaccaaaatgctgctggccgtctatggacccctctggattcttcaagccagtttgcttgaggtaccctacttgtgcgcgtccaaggccttctccggatctgcgcgctagcgcggaagatggtcggaggccattacgtgcaaatggccatcatcaagttaggggcgcttactggcacctatatttataatcatctcacccctcttcaggactggcgcacaacggcctgcgagacctggccgcggctgtagagccagtcgttttctcccaaatggagaccaagctcatcacgtggggggcagacactgccgcgtgcggtgacattgtcgacggcttacccgttccgcccgtaggggccgggagatactgcttgggccggccgatggaatggtctccaaggggtggaggttgctggcgcccatcacggcgtacgcccagcagacaaggggcctcctagggtgtataatcaccagcctaactggcgggacaaaaaccaagtggaaggtgaggtccagattgtgtcgactgctgcccaaactttcctggcaacgtgcatcaatggggtatgctggactgtctaccacggggccggaacgaggaccatcgcatccccaagggtcctgttatccagatgtataccaatgtagaccaagaccttgtgggctggcccgctcctcaaggtgcccgctcattgacaccctgcacctgcggctcctcggacctttacttggtcacgaggcacgccgatgtcttcccgtgcgccggcggggtgatagcaggggcagcctgctctcgccccggcctatttcctacttgaaaggctcctcgggaggtccgctgttgtgccccgcgggacacgccgtgggcatatttagggcgcggtgtgtacccgtggagtggctaaggcggtggactttatccccgtggagagcctggaaacaaccatgaggtccccggtgtttacggacaactcctccccaccagcggtgccccagaccttccaggtggcccatttgcatctcccacaggcagcggcaagagcaccaaagtcccggctgcatatgcagctcagggttataaggtgctagtgctcaacccctctgtcgctgcaacattgggctttggtgcctacatgtctaaggcccagggatcgatcctaacatcaggaccggggtgaggacaattaccactggcagccccatcacgtactccacctacggtaagttccttgccgacggcgggtgctcagggggcgcttatgacataataatctgtgacgagtgccatccacggatgccacatccatcttgggcatcggcactgtccttgaccaagcagagaccgcgggggcgagactggttgtgctcgccaccgctacccctccgggctctatcactgtgccacatcccaacatgaggaggttgctctgtccaccaccggagagatccctttttacggcaaggccatcccccttgatgtaatcaagggggggagacatctcattttctgtcactcaaagaagaagtgtgacgagcttgccgcaaagctggtcgcatgggcgtcaatgccgtggcctactaccgcggtctcgacgtatctgtcatcccgaccggcggcgatgttgtcgtcgtggcaactgatgctctcatgaccggctttactggcgacttcgactcggtgatgactgcaacacgtgcgtcacccagacagtcgatttcagccttgaccctaccttcaccattgagacaaccacgcttccccaggatgctgtctcccgcactcaacgtcggggcaggactggcagggggaggcaaggcacctacgatttgtggcaccgggggagcgcccctctggcatgttcgactcgtctgtcctctgtgagtgctatgacgcgggctgtgcttggtacgagctcacgcctgccgagaccacagttaggctacgagcgtaatgaacaccccggggcttcccgtgtgtcaagaccatcttgaattttgggagggcgtctttacaggcctcacccatatagatgcccacttcctatcccagacaaaacagagcggggagaatcttccttacctggtagcgtacaagccaccgtgtgcgctagggcgcaagccccccccccatcgtgggaccagatgtggaagtgtttggtccgcctcaaacccaccctccacgggccaacacccctgctatacagactgggtgctgttcaaatgaagtcaccctgacgcacccagtcaccaaatacatcatgacatgtatgtcggctga

SEQ ID NO: 487 - DNA, 4869 bp, Hepatitis C virus
tcgcccacaggacgtcaagttcccgggcggcggccagatcgttggtggagtttacttgttgccgcgcaggggccctagattgggtgtgcgcgcgacgaggaagacttccgagcggtcgcaacctcgagtagacgtcagcctatccccaaggcgcgtcggtccgagggcaggacctgggctcagcccgggtacccttggcccctctatggcaatgagggttgcggatgggcgggatggctcctgtccccccgtggtctcggcctagctggggccccacagacccccggcgtaggtcgcgcaatttgggcaaggtcatcgataccctcacgtgcggcttcgccgacctcatggggtacataccgctcgtcggcgcccctcttgggggcgctgccaggccctggcgcatggagtccgggttctggaagacggcgtgaattatgcaacagggaacctccccggttgctctttctctatcttccttctggccttgctctcttgcctgactgtgcccgcttcagcctacaagtgcgcaactccacggggctttaccatgtcaccaatgattgccctaattcgagtattgtgtacgaggcggccgatgctatcctgcacaccccggggtgtgtcccttgcgttcgtaagggtaacacctcggtgtgttggtggcggtaacccctacggtggccaccagggacggcaaactccccacaacgcagcttcgacgtcatatcgatctgctcgtcgggagtgccaccctctgttcggccctctatgtgggggacctgtgcggtctgtctttcttgttggccaactgtttaccctctctcccagacgccactggacaacgcaaggctgcaattgttccatctatcccggccatataacgggccaccgcatggcatgggatatgatgatgaactggtcccctacacggcgttggtaatggcacagctgctccggatcccacaagccatcatggacatgatcgctggtgctcactggggagtcctggcgggcatagcgtatttctctatggtggggaactgggcgaaggtcctgtagtgctgctgctatttgccggcgtcgacgcaaaaacttatgtcaccgggggagctgctgcccacaccgcgtccggacttgctgggctcttcttacaaggccccaagcagaacgtccacttgatcaacaccaacggcagtggcacatcaatagtacggccttgaactgcaacgctagccttgacaccggctggatagcagggcttttctattacaacaaattcaactcttcaggttgtcccgagaggttggccagctgccgactcctactgattttgaccagggctggggccctatcagtcatgccaacggaagcggccccgaccaacgcccctactgctggcactaccccccaaaaccttgcggcattgtgcccgcgaagagtgtgtgtggcccggtatactgcttcctcccagccctgtggtggtgggaacgaccgacaggtcgggcgaacctacctacaactggggtgaaaatgatacggacgtcttcgtccttaacaacatcaggccaccgctgggtaattggtttggttgacctggatgaactcaactggattcaccaaagtgtgcggggcgcctccttgtgacatcgggggggcgggcaacaacaccttgcactgccccactgattgtttccgcaagcatccggaagccacgtactctcggtgcggctccgtccctggatcacgcccaggtgcctggtccactacccatacaggctttggcattatccctgtaccatcaactacaccatatttaaagtcaggatgtacgtgagagggatcgagcacaggttggaagcgcctgcaactggacgcggggcgagcgttgcgatctggaagacagggacaggtccgagcttagcccgttgctgctgtctaccacacagtggcaagtccttccgtgttccttcacggccatgccagccttgtccaccggcctctccacctccaccagaacattgtggatgtgcagtatttgtacggggtggggtcaagcattgcgtcctgggccattaagtgggagtacgtcgttctcctgttccttttgcttgcagacgcgcgcgtctgtcctgcttgtggatgatgttactcatatcccaagcggaggcggctttggagaaccttgtaatactcaatgcagcatccctggccgggacgcacggtcttgtatccttcctcgtgttcttctgctttgcatggtatctgaaagcaggtgggtgcccggagcggcttacgccttctacgggatgtggcctctcctcctgctcctgctggcgttgccccagcgggcatacgcgctggacacggaggtggccgcgtcgtgtggcggcgttgtcttgtcgggttaatggcgctgactttatcaccacactacaagcgctatatcagctggtgcttatggtggcttcagtattttctgaccagagcggaagcgcagctgcacgtgtgggttccccccctcaacgtccgggggggggtgacgctgtcatcttactcatgtgtgttgtacacccgactctggtattcgacatcaccaaaatgctgctggccgtctatggacccctctggattcttcaagccagtttgcttgaggtaccctacttgtgcgcgtccaaggccttctccggatctgcgcgctagcgcggaagatggtcggaggccattacgtgcaaatggccatcatcaagttaggggcgcttactggcacctatatttataatcatctcacccctcttcaggactggcgcacaacggcctgcgagacctggccgcggctgtagagccagtcgtcttctcccaaatggagaccaagctcatcacgtggggggcagacactgccgcgtgcggtgacattgtcgacggcttacccgttccgcccgtaggggccgggagatactgcttgggccggccgatggaatggtctccaaggggtggaggttgctggcgcccatcacggcgtacgcccagcagacaaggggcctcctagggtgtataatcaccagcctaactggcgggacaaaaaccaagtggaaggtgaggtccagattgtgtcgactgctgcccaaactttcctggcaacgtgcatcaatggggtatgctggactgtctaccacggggccggaacgaggaccatcgcatccccaagggtcctgttatccagatgtataccaatgtagaccaagaccttgtgggctggcccgctcctcaaggtgcccgctcattgacaccctgcacctgcggctcctcggacctttacttggtcacgaggcacgccgatgtcttcccgtgcgccggcggggtgatagcaggggcagcctgctctcgccccggcctatttcctacttgaaaggctcctcgggaggtccgctgttgtgcccctcgggacacgccgtgggcatatttagggcgcggtgtgtacccgtggagtggctaaggcggtggactttatccccgtggagagcctggaaacaaccatgaggtccccggtgtttacggacaactcctccccaccagcggtgccccagaccttccaggtggcccatttgcatctcccacaggcagcggcaagagcaccaaagtcccggctgcatatgcagctcagggttataaggtgctagtgctcaacccctctgtcgctgcaacattgggctttggtgcctacatgtctaaggcccagggatcgatcctaacatcaggaccggggtgaggacaattaccactggcagccccatcacgtactccacctacggtaagttccttgccgacggcgggtgctcagggggcgcttatgacataataatctgtgacgagtgccatccacggatgccacatccatcttgggcatcggcactgtccttgaccaagcagagaccgcgggggcgagactggttgtgctcgccaccgctacccctccgggctctatcactgtgccacatcccaacatgaggaggttgctctgtccaccaccggagagatccctttttacggcaaggccatcccccttgatgtaatcaagggggggagacatctcattttctgtcactcaaagaagaagtgtgacgagcttgccgcaaagctggtcgcatgggcgtcaatgccgtggcctactaccgcggtctcgacgtatctgtcatcccgaccggcggcgatgttgtcgtcgtggcaactgatgctctcatgaccggctttactggcgacttcgactcggtgatgactgcaacacgtgcgtcacccagacagtcgatttcagccttgaccctaccttcaccattgagacgaccacgcttccccaggatgctgtctcccgcactcaacgtcggggcaggactggcagggggaggcaaggcacctacgatttgtggcaccgggggagcgcccctctggcatgttcgactcgtctgtcctctgtgagtgctatgacgcgggctgtgcttggtacgagctcacgcctgccgagaccacagttaggctacgagcgtaatgaacaccccggggcttcctgtgtgtcaagaccatcttgaattttgggagggcgtctttacaggcctcacccatatagatgcccacttcctatcccagacaaaacagagcggggagaatcttccttacctggtagcgtacaagccaccgtgtgcgctagggcgcaagccccccccccatcgtgggaccagatgtggaagtgtttggtccgcctcaaacccaccctccacgggccaacacccctgctatacagactgggtgctgttcaaatgaagtcaccctgacgcacccagtcaccaaatacatcatgacatgtatgtcggctga

SEQ ID NO: 488 - DNA, 4869 bp, Hepatitis C virus; identical to SEQ ID NO: 460

SEQ ID NO: 489 - DNA, 4869 bp, Hepatitis C virus
tcgcccacaggacgtcaagttcccgggcggcggccagatcgttggtggagtttacttgttgccgcgcaggggccctagattgggtgtgcgcgcgacgaggaagacttccgagcggtcgcaacctcgagtagacgtcagcctatccccaaggcgcgtcggtccgagggcaggacctgggctcagcccgggtacccttggcccctctatggcaatgagggttgcggatgggcgggatggctcctgtccccccgtggtctcggcctagctggggccccacagacccccggcgtaggtcgcgcaatttgggcaaggtcatcgataccctcacgtgcggcttcgccgacctcatggggtacataccgctcgtcggcgcccctcttgggggcgctgccaggccctggcgcatggagtccgggttctggaagacggcgtgaattatgcaacagggaacctccccggttgctctttctctatcttccttctggccttgctctcttgcctgactgtgcccgcttcagcctacaagtgcgcaactccacggggctttaccatgtcaccaatgattgccctaattcgagtattgtgtacgaggcggccgatgctatcctgcacaccccggggtgtgtcccttgcgttcgtaagggtaacaccccggtgtgttggtggcggtaacccctacggtggccaccagggacggcaaactccccacaacgcagcttcgacgtcatatcgatctgctcgtcgggagtgccaccctctgttcggccctctatgtgggggacctgtgcggtctgtctttcttgttggccaactgtttaccctctctcccagacgccactggacaacgcaaggctgcaattgttccatctatcccggccatataacgggccaccgcatggcatgggatatgatgatgaactggtcccctacacggcgttggtaatggcacagctgctccggatcccacaagccatcatggacatgatcgctggtgctcactggggagtcctggcgggcatagcgtatttctctatggtggggaactgggcgaaggtcctgtagtgctgctgctatttgccggcgtcgacgcaaaaacttatgtcaccgggggagctgctgcccacaccacgtccggacttgctgggctcttcttacaaggccccaagcagaacgtccacttgatcaacaccaacggcagtggcacatcaatagtacggccttgaactgcaacgctagccttgacaccggctggatagcagggcttttctattacaacaaattcaactcttcaggttgtcccgagaggttggccagctgccgactcctactgattttgaccagggctggggccctatcagtcatgccaacggaagcggccccgaccaacgcccctactgctggcactaccccccaaaaccttgcggcattgtgcccgcgaagagtgtgtgtggcccggtatattgcttcctcccagccctgtggtggtgggaacgaccgacaggtcgggcgaacctacctacaactggggtgaaaatgatacggacgtcttcgtccttaacaacatcaggccaccgctgggtaattggtttggttgacctggatgaactcaactggattcaccaaagtgtgcggggcgcctccttgtgacatcgggggggcgggcaacaacaccttgcactgccccactgattgtttccgcaagcatccggaagccacgtactctcggtgcggctccgtccctggatcacgcccaggtgcctggtccactacccatacaggctttggcattatccctgtaccatcaactacaccatatttaaagtcaggatgtacgtgggagggatcgagcacaggttggaagcgcctgcaactggacgcggggcgagcgttgcgatctggaagacagggacaggtccgagcttagcccgttgctgctgtctaccacacagtggcaagtccttccgtgttccttcacggccatgccagccttgtccaccggcctctccacctccaccagaacattgtggatgtgcagtatttgtacggggtggggtcaagcattgcgtcctgggccattaagtgggagtacgtcgttctcctgttccttttgcttgcagacgcgcgcgtctgtcctgcttgtggatgatgttactcatatcccaagcggaggcggctttggagaaccttgtaatactcaatgcagcatccctggccgggacgcacggtcttgtatccttcctcgtgttcttctgctttgcatggtatctgaaagcaggtgggtgcccggagcggcttacgccttctacgggatgtggcctctcctcctgctcctgctggcgttgccccagcgggcatacgcgctggacacggaggtggccgcgtcgtgtggcggcgttgtcttgtcgggttaatggcgctgactttatcaccacactacaagcgctatatcagctggtgcttatggtggcttcagtattttctgaccagagcggaagcgcagctgcacgtgtgggttccccccctcaacgtccgggggggggtgacgctgtcatcttactcatgtgtgttgtacacccgactctggtattcgacatcaccaaaatgctgctggccgtctatggacccctctggattcttcaagccagtttgcttgaggtaccctacttgtgcgcgtccaaggccttctccggatctgcgcgctagcgcggaagatggtcggaggccattacgtgcaaatggccatcatcaagttaggggcgcttactggcacctatatttataatcatctcacccctcttcaggactggcgcacaacggcctgcgagacctggccgcggctgtagagccagtcgtcttctcccaaatggagaccaagctcatcacgtggggggcagacactgccgcgtgcggtgacattgtcgacggcttacccgttccgcccgtaggggccgggagatactgcttgggccggccgatggaatggtctccaaggggtggaggttgctggcgcccatcacggcgtacgcccagcagacaaggggcctcctagggtgtataatcaccagcctaactggcgggacaaaaaccaagtggaaggtgaggtccagattgtgtcgactgctgcccaaactttcctggcaacgtgcatcaatggggtatgctggactgtctaccacggggccggaacgaggaccatcgcatccccaagggtcctgttatccagatgtataccaatgtagaccaagaccttgtgggctggcccgctcctcaaggtgcccgctcattgacaccctgcacctgcggctcctcggacctttacttggtcacgaggcacgccgatgtcttcccgtgcgccggcggggtgatagcaggggcagcctgctctcgccccggcctatttcctacttgaaaggctcctcgggaggtccgctgttgtgccccgcgggacacgccgtgggcatatttagggcgcggtgtgtacccgtggagtggctaaggcggtggactttatccccgtggagagcctggaaacaaccatgaggtccccggtgtttacggacaactcctccccaccagcggtgccccagaccttccaggtggcccatttgcatctcccacaggcagcggcaagagcaccaaagtcccggctgcatatgcagctcagggttataaggtgctagtgctcaacccctctgtcgctgcaacattgggctttggtgcctacatgtctaaggcccagggatcgatcctaacatcaggaccggggtgaggacaattaccactggcagccccatcacgtactccacctacggtaagttccttgccgacggcgggtgctcagggggcgcttatgacataataatctgtgacgagtgccatccacggatgccacatccatcttgggcatcggcactgtccttgaccaagcagagaccgcgggggcgagactggttgtgctcgccaccgctacccctccgggctctatcactgtgccacatcccaacatgaggaggttgctctgtccaccaccggagagatccctttttacggcaaggccatcccccttgatgtaatcaagggggggagacatctcattttctgtcactcaaagaagaagtgtgacgagcttgccgcaaagctggtcgcatgggcgtcaatgccgtggcctactaccgcggtctcgacgtatctgtcatcccgaccggcggcgatgttgtcgtcgtggcaactgatgctctcatgaccggctttactggcgacttcgactcggtgatgactgcaacacgtgcgtcacccagacagtcgatttcagccttgaccctaccttcaccattgagacaaccacgcttccccaggatgctgtctcccgcactcaacgtcggggcaggactggcagggggaggcaaggcacctacgatttgtggcaccgggggagcgcccctctggcatgttcgactcgtctgtcctctgtgagtgctatgacgcgggctgtgcttggtacgagctcacgcctgccgagaccacagttaggctacgagcgtaatgaacaccccggggcttcccgtgtgtcaagaccatcttgaattttgggagggcgtctttacaggcctcacccatatagatgcccacttcctatcccagacaaaacagagcggggagaatcttccttacctggtagcgtacaagccaccgtgtgcgctagggcgcaagccccccccccatcgtgggaccagatgtggaagtgtttggtccgcctcaaacccaccctccacgggccaacacccctgctatacagactgggtgctgttcaaatgaagtcaccctgacgcacccagtcaccaaatacatcatgacatgtatgtcggctga

SEQ ID NO: 490 - DNA, 4869 bp, Hepatitis C virus
tcgcccacaggacgtcaagttcccgggcggcggccagatcgttggtggagtttacttgttgccgcgcaggggccctagattgggtgtgcgcgcgacgaggaagacttccgagcggtcgcaacctcgagtagacgtcagcctatccccaaggcgcgtcggtccgagggcaggacctgggctcagcccgggtacccttggcccctctatggcaatgagggttgcggatgggcgggatggctcctgtccccccgtggtctcggcctagctggggccccacagacccccggcgtaggtcgcgcaatttgggcaaggtcatcgataccctcacgtgcggcttcgccgacctcatggggtacataccgctcgtcggcgcccctcttgggggcgctgccaggccctggcgcatggagtccgggttctggaagacggcgtgaattatgcaacagggaacctccccggttgctctttctctatcttccttctggccttggtctcttgcctgactgtgcccgcttcagcctacaagtgcgcaactccacggggctttaccatgtcaccaatgattgccctaattcgagtattgtgtacgaggcggccgatgctatcctgcacaccccggggtgtgttccttgcgttcgtaagggtaacacctcggtgtgttggtggcggtaacccctacggtggccaccagggacggcaaactccccacaacgcagcttcgacgtcatatcgatctgctcgtcgggagtgccaccctctgttcggccctctatgtgggggacctgtgcggtctgtctttcttgttggccaactgtttaccctctctcccagacgccactggacaacgcaaggctgcaattgttccatctatcccggccatataacgggccaccgcatggcatgggatatgatgatgaactggtcccctacacggcgttggtaatggcacagctgctccggatcccacaagccatcatggacatgatcgctggtgctcactggggagtcctggcgggcatagcgtatttctctatggtggggaactgggcgaaggtcctgtagtgctgctgctatttgccggcgtcgacgcaaaaacttatgtcaccgggggagctgctgcccacaccacgtccggacttgctgggctcttcttacaaggccccaagcagaacgtccacttgatcaacaccaacggcagtggcacatcaatagtacggccttgaactgcaacgctagccttgacaccggctggatagcagggcttttctattacaacaaattcaactcttcaggttgtcccgagaggttggccagctgccgactcctactgattttgaccagggctggggccctatcagtcatgccaacggaagcggccccgaccaacgcccctactgctggcactaccccccaaaaccttgcggcattgtgcccgcgaagagtgtgtgtggcccggtatattgcttcctcccagccctgtggtggtgggaacgaccgacaggtcgggcgaacctacctacaactggggtgaaaatgatacggacgtcttcgtccttaacaacatcaggccaccgctgggtaattggtttggttgacctggatgaactcaactggattcaccaaagtgtgcggggcgcctccttgtgacatcgggggggcgggcaacaacaccttgcactgccccactgattgtttccgcaagcatccggaagccacgtactctcggtgcggctccgtccctggatcacgcccaggtgcctggtccactacccatacaggctttggcattatccctgtaccatcaactacaccatatttaaagtcaggatgtacgtgggagggatcgagcacaggttggaagcgcctgcaactggacgcggggcgagcgttgcgatctggaagacagggacaggtccgagcttagcccgttgctgctgtctaccacacagtggcaagtccttccgtgttccttcacggccatgccagccttgtccaccggcctctccacctccaccagaacattgtggatgtgcagtatttgtacggggtggggtcaagcattgcgtcctgggccattaagtgggagtacgtcgttctcctgttccttttgcttgcagacgcgcgcgtctgtcctgcttgtggatgatgttactcatatcccaagcggaggccgctttggagaaccttgtaatactcaatgcagcatccctggccgggacgcacggtcttgtatccttcctcgtgttcttctgctttgcatggtatctgaaagcaggtgggtgcccggagcggcttacgccttctacgggatgtggcctctcctcctgctcctgctggcgttgccccagcgggcatacgcgctggacacggaggtggccgcgtcgtgtggcggcgttgtcttgtcgggttaatggcgctgactttatcaccacactacaagcgctatatcagctggtgcttatggtggcttcagtattttctgaccagagcggaagcgcagctgcacgtgtgggttccccccctcaacgtccgggggggggtgacgctgtcatcttactcatgtgtgttgtacacccgactctggtattcgacatcaccaaaatgctgctggccgtctatggacccctctggattcttcaagccagtttgcttgaggtaccctacttgtgcgcgtccaaggccttctccggatctgcgcgctagcgcggaagatggtcggaggccattacgtgcaaatggccatcatcaagttaggggcgcttactggcacctatatttataatcatctcacccctcttcaggactggcgcacaacggcctgcgagacctggccgcggctgtagagccagtcgtcttctcccaaatggagaccaagctcatcacgtggggggcagacactgccgcgtgcggtgacattgtcgacggcttacccgttccgcccgtaggggccgggagatactgcttgggccggccgatggaatggtctccaaggggtggaggttgctggcgcccatcacggcgtacgcccagcagacaaggggcctcctagggtgtataatcaccagcctaactggcgggacaaaaaccaagtggaaggtgaggtccagattgtgtcgactgctgcccaaactttcctggcaacgtgcatcaatggggtatgctggactgtctaccacggggccggaacgaggaccatcgcatccccaagggtcctgttatccagatgtataccaatgtagaccaagaccttgtgggctggcccgctcctcaaggtgcccgctcattgacaccctgcacctgcggctcctcggacctttacttggtcacgaggcacgccgatgtcttcccgtgcgccggcggggtgatagcaggggcagcctgctctcgccccggcctatttcctacttgaaaggctcctcgggaggtccgctgttgtgccccgcgggacacgccgtgggcatatttagggcgcggtgtgtacccgtggagtggctaaggcggtggactttatccccgtggagagcctggaaacaaccatgaggtccccggtgtttacggacaactcctccccaccagcggtgccccagaccttccaggtggcccatttgcatctcccacaggcagcggcaagagcaccaaagtcccggctgcatatgcagctcagggttataaggtgctagtgctcaacccctctgtcgctgcaacattgggctttggtgcctacatgtctaaggcccagggatcgatcctaacatcaggaccggggtgaggacaattaccactggcagccccatcacgtactccacctacggtaagttccttgccgacggcgggtgctcagggggcgcttatgacataataatctgtgacgagtgccatccacggatgccacatccatcttgggcatcggcactgtccttgaccaagcagagaccgcgggggcgagactggttgtgctcgccaccgctacccctccgggctctatcactgtgccacatcccaacatgaggaggttgctctgtccaccaccggagagatccctttttacggcaaggccatcccccttgatgtaatcaagggggggagacatctcattttctgtcactcaaagaagaagtgtgacgagcttgccgcaaagctggtcgcatgggcgtcaatgccgtggcctactaccgcggtctcgacgtatctgtcatcccgaccggcggcgatgttgtcgtcgtggcaactgatgctctcatgaccggctttactggcgacttcgactcggtgatgactgcaacacgtgcgtcacccagacagtcgatttcagccttgaccctaccttcaccattgagacaaccacgcttccccaggatgctgtctcccgcactcaacgtcggggcaggactggcagggggaggcaaggcacctacgatttgtggcaccgggggagcgcccctctggcatgttcgactcgtctgtcctctgtgagtgctatgacgcgggctgtgcttggtacgagctcacgcctgccgagaccacagttaggctacgagcgtaatgaacaccccggggcttcccgtgtgtcaagaccatcttgaattttgggagggcgtctttacaggcctcacccatatagatgcccacttcctatcccagacaaaacagagcggggagaatcttccttacctggtagcgtacaagccaccgtgtgcgctagggcgcaagccccccccccatcgtgggaccagatgtggaagtgtttggtccgcctcaaacccaccctccacgggccaacacccctgctatacagactgggtgctgttcaaatgaagtcaccctgacgcacccagtcaccaaatacatcatgacatgtatgtcggctga

SEQ ID NO: 491 - DNA, 4869 bp, Hepatitis C virus
tcgcccacaggacgtcaagttcccgggcggcggccagatcgttggtggagtttacttgttgccgcgcaggggccctagattgggtgtgcgcgcgacgaggaagacttccgagcggtcgcaacctcgagtagacgtcagcctatccccaaggcgcgtcggtccgagggcaggacctgggctcagcccgggtacccttggcccctctatggcaatgagggttgcggatgggcgggatggctcctgtccccccgtggtctcggcctagctggggccccacagacccccggcgtaggtcgcgcaatttgggcaaggtcatcgataccctcacgtgcggcttcgccgacctcatggggtacataccgctcgtcggcgcccctcttgggggcgctgccaggccctggcgcatggagtccgggttctggaagacggcgtgaattatgcaacagggaacctccccggttgctctttctctatcttccttctggccttgctctcttgcctgactgtgcccgcttcagcctacaagtgcgcaactccacggggctttaccatgtcaccaatgattgccctaattcgagtattgtgtacgaggcggccgatgctatcctgcacaccccggggtgtgtcccttgcgttcgtaagggtaacacctcggtgtgttggtggcggtaacccctacggtggccaccagggacggcaaactccccacaacgcagcttcgacgtcatatcgatctgctcgtcgggagtgccaccctctgttcggccctctatgtgggggacctgtgcggtctgtctttcttgttggccaactgtttaccctctctcccagacgccactggacaacgcaaggctgcaattgttccatctatcccggccatataacgggccaccgcatggcatgggatatgatgatgaactggtcccctacacggcgttggtaatggcacagctgctccggatcccacaagccatcatggacatgatcgctggtgctcactggggagtcctggcgggcatagcgtatttctctatggtggggaactgggcgaaggtcctgtagtgctgctgctatttgccggcgtcgacgcaaaaacttatgtcaccgggggagctgctgcccacaccacgtccggacttgctgggctcttcttacaaggccccaagcagaacgtccacttgatcaacaccaacggcagtggcacatcaatagtacggccttgaactgcaacgctagccttgacaccggctggatagcagggcttttctattacaacaaattcaactcttcaggttgtcccgagaggttggccagctgccgactcctactgattttgaccagggctggggccctatcagtcatgccaacggaagcggccccgaccaacgcccctactgctggcactaccccccaaaaccttgcggcattgtgcccgcgaagagtgtgtgtggcccggtatattgcttcctcccagccctgtggtggtgggaacgaccgacaggtcgggcgaacctacctacaactggggtgaaaatgatacggacgtcttcgtccttaacaacatcaggccaccgctgggtaattggtttggttgacctggatgaactcaaccggattcaccaaagtgtgcggggcgcctccttgtgacatcgggggggcgggcaacaacaccttgcactgccccactgattgtttccgcaagcatccggaagccacgtactctcggtgcggctccgtccctggatcacgcccaggtgcctggtccactacccatacaggctttggcattatccctgtaccatcaactacaccatatttaaagtcaggatgtacgtgggagggatcgagcacaggttggaagcgcctgcaactggacgcggggcgagcgttgcgatctggaagacagggacaggtccgagcttagcccgttgctgctgtctaccacacagtggcaagtccttccgtgttccttcacggccatgccagccttgtccaccggcctctccacctccaccagaacattgtggatgtgcagtatttgtacggggtggggtcaagcattgcgtcctgggccattaagtgggagtacgtcgttctcctgttccttttgcttgcagacgcgcgcgtctgtcctgcttgtggatgatgttactcatatcccaagcggaggcggctttggagaaccttgtaatactcaatgcagcatccctggccgggacgcacggtcttgtatccttcctcgtgttcttctgctttgcatggtatctgaaagcaggtgggtgcccggagcggcttacgccttctacgggatgtggcctctcctcctgctcctgctggcgttgccccagcgggcatacgcgctggacacggaggtggccgcgtcgtgtggcggcgttgtcttgtcgggttaatggcgctgactttatcaccacactacaagcgctatatcagctggtgcttatggtggcttcagtattttctgaccagagcggaagcgcagctgcacgtgtgggttccccccctcaacgtccgggggggggtgacgctgtcatcttactcatgtgtgttgtacacccgactctggtattcgacatcaccaaaatgctgctggccgtctatggacccctctggattcttcaagccagtttgcttgaggtaccctacttgtgcgcgtccaaggccttctccggatctgcgcgctagcgcggaagatggtcggaggccattacgtgcaaatggccatcatcaagttaggggcgcttactggcacctatatttataatcatctcacccctcttcaggactggcgcacaacggcctgcgagacctggccgcggctgtagagccagtcgttttctcccaaatggagaccaagctcatcacgtggggggcagacactgccgcgtgcggtgacattgtcgacggcttacccgttccgcccgtaggggccgggagatactgcttgggccggccgatggaatggtctccaaggggtggaggttgctggcgcccatcacggcgtacgcccagcagacaaggggcctcctagggtgtataatcaccagcctaactggcgggacaaaaaccaagtggaaggtgaggtccagattgtgtcgactgctgcccaaactttcctggcaacgtgcatcaatggggtatgctggactgtctaccacggggccggaacgaggaccatcgcatccccaagggtcctgttatccagatgtataccaatgtagaccaagaccttgtgggctggcccgctcctcaaggtgcccgctcattgacaccctgcacctgcggctcctcggacctttacttggtcacgaggcacgccgatgtcttcccgtgcgccggcggggtgatagcaggggcagcctgctctcgccccggcctatttcctacttgaaaggctcctcgggaggtccgctgttgtgccccgcgggacacgccgtgggcatatttagggcgcggtgtgtacccgtggagtggctaaggcggtggactttatccccgtggagagcctggaaacaaccatgaggtccccggtgtttacggacaactcctccccaccagcggtgccccagaccttccaggtggcccatttgcatctcccacaggcagcggcaagagcaccaaggtcccggctgcatatgcagctcagggttataaggtgctagtgctcaacccctctgtcgctgcaacattgggctttggtgcctacatgtctaaggcccagggatcgatcctaacatcaggaccggggtgaggacaattaccactggcagccccatcacgtactccacctacggtaagttccttgccgacggcgggtgctcagggggcgcttatgacataataatctgtgacgagtgccatccacggatgccacatccatcttgggcatcggcactgtccttgaccaagcagagaccgcgggggcgagactggttgtgctcgccaccgctacccctccgggctctatcactgtgccacatcccaacatgaggaggttgctctgtccaccaccggagagatccctttttacggcaaggccatcccccttgatgtaatcaagggggggagacatctcattttctgtcactcaaagaagaagtgtgacgagcttgccgcaaagctggtcgcatgggcgtcaatgccgtggcctactaccgcggtctcgacgtatctgtcatcccgaccggcggcgatgttgtcgtcgtggcaactgatgctctcatgaccggctttactggcgacttcgactcggtgatgactgcaacacgtgcgtcacccagacagtcgatttcagccttgaccctaccttcaccattgagacaaccacgcttccccaggatgctgtctcccgcactcaacgtcggggcaggactggcagggggaggcaaggcacctacgatttgtggcaccgggggagcgcccctctggcatgttcgactcgtctgtcctctgtgagtgctatgacgcgggctgtgcttggtacgagctcacgcctgccgagaccacagttaggctacgagcgtaatgaacaccccggggcttcccgtgtgtcaagaccatcttgaattttgggagggcgtctttacaggcctcacccatatagatgcccacttcctatcccagacaaaacagagcggggagaatcttccttacctggtagcgtacaagccaccgtgtgcgctagggcgcaagccccccccccatcgtgggaccagatgtggaagtgtttggtccgcctcaaacccaccctccacgggccaacacccctgctatacagactgggtgctgttcaaatgaagtcaccctgacgcacccagtcaccaaatacatcatgacatgtatgtcggctga

SEQ ID NO: 492 - DNA, 4869 bp, Hepatitis C virus; identical to SEQ ID NO: 474

SEQ ID NO: 493 - DNA, 4869 bp, Hepatitis C virus; identical to SEQ ID NO: 460

SEQ ID NO: 494 - DNA, 4869 bp, Hepatitis C virus
tcgcccacaggacgtcaagttcccgggcggcggccagatcgttggtggagtttacttgttgccgcgcaggggccctagattgggtgtgcgcgcgacgaggaagacttccgagcggtcgcaacctcgagtagacgtcagcctatccccaaggcgcgtcggtccgagggcaggacctgggctcagcccgggtacccttggcccctctatggcaatgagggttgcggatgggcgggatggctcctgtccccccgtggtctcggcctagctggggccccacagacccccggcgtaggtcgcgcaatttgggcaaggtcatcgataccctcacgtgcggcttcgccgacctcatggggtacataccgctcgtcggcgcccctcttgggggcgctgccaggccctggcgcatggagtccgggttctggaagacggcgtgaattatgcaacagggaacctccccggttgctctttctctatcttccttctggccttgctctcttgcctgactgtgcccgcttcagcctacaagtgcgcaactccacggggctttaccatgtcaccaatgattgccctaattcgagtattgtgtacgaggcggccgatgctatcctgcacaccccggggtgtgtcccttgcgttcgtaagggtaacacctcggtgtgttggtggcggtaacccctacggtggccaccagggacggcaaactccccacaacgcagcttcgacgtcatatcgatctgctcgtcgggagtgccaccctctgttcggccctctatgtgggggacctgtgcggtctgtctttcttgttggccaactgtttaccctctctcccagacgccactggacaacgcaaggctgcaattgttccatctatcccggccatataacgggccaccgcatggcatgggatatgatgatgaactggtcccctacacggcgttggtaatggcacagctgctccggatcccacaagccatcatggacatgatcgctggtgctcactggggagtcctggcgggcatagcgtatttctctatggtggggaactgggcgaaggtcctgtagtgctgctgctatttgccggcgtcgacgcaaaaacttatgtcaccgggggagctgctgcccacaccacgtccggacttgctgggctcttcttacaaggccccaagcagaacgtccacttgatcaacaccaacggcagtggcacatcaatagtacggccttgaactgcaacgctagccttgacaccggctggatagcagggcttttctattacaacaaattcaactcttcaggttgtcccgagaggttggccagctgccgactcctactgattttgaccagggctggggccctatcagtcatgccaacggaagcggccccgaccaacgcccctactgctggcactaccccccaaaaccttgcggcattgtgcccgcgaagagtgtgtgtggcccggtatattgcttcctcccagccctgtggtggtgggaacgaccgacaggtcgggcgaacctacctacaactggggtgaaaatgatacggacgtcttcgtccttaacaacatcaggccaccgctgggtaattggtttggttgacctggatgaactcaaccggattcaccaaagtgtgcggggcgcctccttgtgacatcgggggggcgggcaacaacaccttgcactgccccactgattgtttccgcaagcatccggaagccacgtactctcggtgcggctccgtccctggatcacgcccaggtgcctggtccactacccatacaggctttggcattatccctgtaccatcaactacaccatatttaaagtcaggatgtacgtgggagggatcgagcacaggttggaagcgcctgcaactggacgcggggcgagcgttgcgatctggaagacagggacaggtccgagcttagcccgttgctgctgtctaccacacagtggcaagtccttccgtgttccttcacggccatgccagccttgtccaccggcctctccacctccaccagaacattgtggatgtgcagtatttgtacggggtggggtcaagcattgcgtcctgggccattaagtgggagtacgtcgttctcctgttccttttgcttgcagacgcgcgcgtctgtcctgcttgtggatgatgttactcatatcccaagcggaggcggctttggaggaccttgtaatactcaatgcagcatccctggccgggacgcacggtcttgtatccttcctcgtgttcttctgctttgcatggtatctgaaagcaggtgggtgcccggagcggcttacgccttctacgggatgtggcctctcctcctgctcctgctggcgttgccccagcgggcatacgcgctggacacggaggtggccgcgtcgtgtggcggcgttgtcttgtcgggttaatggcgctgactttatcaccacactacaagcgctatatcagctggtgcttatggtggcttcagtattttctgaccagagcggaagcgcagctgcacgtgtgggttccccccctcaacgtccgggggggggtgacgctgtcatcttactcatgtgtgttgtacacccgactctggtattcgacatcaccaaaatgctgctggccgtctatggacccctctggattcttcaagccagtttgcttgaggtaccctacttgtgcgcgtccaaggccttctccggatctgcgcgctagcgcggaagatggtcggaggccattacgtgcaaatggccatcatcaagttaggggcgcttactggcacctatatttataatcatctcacccctcttcaggactggcgcacaacggcctgcgagacctggccgcggctgtagagccagtcgttttctcccaaatggagaccaagctcatcacgtggggggcagacactgccgcgtgcggtgacattgtcgacggcttacccgttccgcccgtaggggccgggagatactgcttgggccggccgatggaatggtctccaaggggtggaggttgctggcgcccatcacggcgtacgcccagcagacaaggggcctcctagggtgtataatcaccagcctaactggcgggacaaaaaccaagtggaaggtgaggtccagattgtgtcgactgctgcccaaactttcctggcaacgtgcatcaatggggtatgctggactgtctaccacggggccggaacgaggaccatcgcatccccaagggtcctgttatccagatgtataccaatgtagaccaagaccttgtgggctggcccgctcctcaaggtgcccgctcattgacaccctgcacctgcggctcctcggacctttacttggtcacgaggcacgccgatgtcttcccgtgcgccggcggggtgatagcaggggcagcctgctctcgccccggcctatttcctacttgaaaggctcctcgggaggtccgctgttgtgccccgcgggacacgccgtgggcatatttagggcgcggtgtgtacccgtggagtggctaaggcggtggactttatccccgtggagagcctggaaacaaccatgaggtccccggtgtttacggacaactcctccccaccagcggtgccccagaccttccaggtggcccatttgcatctcccacaggcagcggcaagagcaccaaagtcccggctgcatatgcagctcagggttataaggtgctagtgctcaacccctctgtcgctgcaacattgggctttggtgcctacatgtctaaggcccagggatcgatcctaacatcaggaccggggtgaggacaattaccactggcagccccatcacgtactccacctacggtaagttccttgccgacggcgggtgctcagggggcgcttatgacataataatctgtgacgagtgccatccacggatgccacatccatcttgggcatcggcactgtccttgaccaagcagagaccgcgggggcgagactggttgtgctcgccaccgctacccctccgggctctatcactgtgccacatcccaacatgaggaggttgctctgtccaccaccggagagatccctttttacggcaaggccatcccccttgatgtaatcaagggggggagacatctcattttctgtcactcaaagaagaagtgtgacgagcttgccgcaaagctggtcgcatgggcgtcaatgccgtggcctactaccgcggtctcgacgtatctgtcatcccgaccggcggcgatgttgtcgtcgtggcaactgatgctctcatgaccggctttactggcgacttcgactcggtgatgactgcaacacgtgcgtcacccagacagtcgatttcagccttgaccctaccttcaccattgagacaaccacgcttccccaggatgctgtctcccgcactcaacgtcggggcaggactggcagggggaggcaaggcacctacgatttgtggcaccgggggagcgcccctctggcatgttcgactcgtctgtcctctgtgagtgctatgacgcgggctgtgcttggtacgagctcacgcctgccgagaccacagttaggctacgagcgtaatgaacaccccggggcttcccgtgtgtcaagaccatcttgaattttgggagggcgtctttacaggcctcacccatatagatgcccacttcctatcccagacaaaacagagcggggagaatcttccttacctggtagcgtacaagccaccgtgtgcgctagggcgcaagccccccccccatcgtgggaccagatgtggaagtgtttggtccgcctcaaacccaccctccacgggccaacacccctgctatacagactgggtgctgttcaaatgaagtcaccctgacgcacccagtcaccaaatacatcatgacatgtatgtcggctga

SEQ ID NO: 495 - DNA, 4869 bp, Hepatitis C virus; identical to SEQ ID NO: 474

SEQ ID NO: 496 - DNA, 4869 bp, Hepatitis C virus
tcgcccacaggacgtcaagttcccgggcggcggccagatcgttggtggagtttacttgttgccgcgcaggggccctagattgggtgtgcgcgcgacgaggaagacttccgagcggtcgcaacctcgagtagacgtcagcctatccccaaggcgcgtcggtccgagggcaggacctgggctcagcccgggtacccttggcccctctatggcaatgagggttgcggatgggcgggatggctcctgtccccccgtggtctcggcctagctggggccccacagacccccggcgtaggtcgcgcaatttgggcaaggtcatcgataccctcacgtgcggcttcgccgacctcatggggtacataccgctcgtcggcgcccctcttgggggcgctgccaggccctggcgcatggagtccgggttctggaagacggcgtgaattatgcaacagggaacctccccggttgctctttctctatcttccttctggccttgctctcttgcctgactgtgcccgcttcagcctacaagtgcgcaactccacggggctttaccatgtcaccaatgattgccctaattcgagtattgtgtacgaggcggccgatgctatcctgcacaccccggggtgtgtcccttgcgttcgtaagggtaacacctcggtgtgttggtggcggtaacccctacggtggccaccagggacggcaaactccccacaacgcagcttcgacgtcatatcgatctgctcgtcgggagtgccaccctctgttcggccctctatgtgggggacctgtgcggtctgtctttcttgttggccaactgtttaccctctctcccagacgccactggacaacgcaaggctgcaattgttccatctatcccggccatataacgggccaccgcatggcatgggatatgatgatgaactggtcccctacacggcgttggtaatggcacagctgctccggatcccacaagccatcatggacatgatcgctggtgctcactggggagtcctggcgggcatagcgtatttctctatggtggggaactgggcgaaggtcctgtagtgctgctgctatttgccggcgtcgacgcaaaaacttatgtcaccgggggagctgctgcccacaccacgtccggacttgctgggctcttcttacaaggccccaagcagaacgtccacttgatcaacaccaacggcagtggcacatcaatagtacggccttgaactgcaacgctagccttgacaccggctggatagcagggcttttctattacaacaaattcaactcttcaggttgtcccgagaggttggccagctgccgactcctactgattttgaccagggctggggccctatcagtcatgccaacggaagcggccccgaccaacgcccctactgctggcactaccccccaaaaccttgcggcattgtgcccgcgaagagtgtgtgtggcccggtatattgcttcctcccagccctgtggtggtgggaacgaccgacaggtcgggcgaacctacctacaactggggtgaaaatgatacggacgtcttcgtccttaacaacatcaggccaccgctgggtaattggtttggttgacctggatgaactcaaccggattcaccaaagtgtgcggggcgcctccttgtgacatcgggggggcgggcaacaacaccttgcactgccccactgattgtttccgcaagcatccggaagccacgtactctcggtgcggctccgtccctggatcacgcccaggtgcctggtccactacccatacaggctttggcattatccctgtaccatcaactacaccatatttaaagtcaggatgtacgtgggagggatcgagcacaggttggaagcgcctgcaactggacgcggggcgagcgttgcgatctggaagacagggacaggtccgagcttagcccgttgctgctgtctaccacacagtggcaagtccttccgtgttccttcacggccatgccagccttgtccaccggcctctccacctccaccagaacattgtggatgtgcagtatttgtacggggtggggtcaagcattgcgtcctgggccattaagtgggagtacgtcgttctcctgttccttttgcttgcagacgcgcgcgtctgtcctgcttgtggatgatgttactcatatcccaagcggaggcggctttggagaaccttgtaatactcaatgcagcatccctggccgggacgcacggtcttgtatccttcctcgtgttcttctgctttgcatggtatctgaaagcaggtgggtgcccggagcggcttacgccttctacgggatgtggcctctcctcctgctcctgctggcgttgccccagcgggcatacgcgctggacacggaggtggccgcgtcgtgtggcggcgttgtcttgtcgggttaatggcgctgactttatcaccacactacaagcgctatatcagctggtgcttatggtggcttcagtattttctgaccagagcggaagcgcagctgcacgtgtgggttccccccctcaacgtccgggggggggtgacgctgtcatcttactcatgtgtgttgtacacccgactctggtattcgacatcaccaaaatgctgctggccgtctatggacccctctggattcttcaagccagtttgcttgaggtaccctacttgtgcgcgtccaaggccttctccggatctgcgcgctagcgcggaagatggtcggaggccattacgtgcaaatggccatcatcaagttaggggcgcttactggcacctatatttataatcatctcacccctcttcaggactggcgcacaacggcctgcgagacctggccgcggctgtagagccagtcgttttctcccaaatggagaccaagctcatcacgtggggggcagacactgccgcgtgcggtgacattgtcgacggcttacccgttccgcccgtaggggccgggagatactgcttgggccggccgatggaatggtctccaaggggtggaggttgctggcgcccatcacggcgtacgcccagcagacaaggggcctcctagggtgtataatcaccagcctaactggcgggacaaaaaccaagtggaaggtgaggtccagattgtgtcgactgctgcccaaactttcctggcaacgtgcatcaatggggtatgctggactgtctaccacggggccggaacgaggaccatcgcatccccaagggtcctgttatccagatgtataccaatgtagaccaagaccttgtgggctggcccgctcctcaaggtgcccgctcattgacaccctgcacctgcggctcctcggacctttacttggtcacgaggcacgccgatgtcttcccgtgcgccggcggggtgatagcaggggcagcctgctctcgccccggcctatttcctacttgaaaggctcctcgggaggtccgctgttgtgccccgcgggacacgccgtgggcatatttagggcgcggtgtgtacccgtggagtggctaaggcggtggactttatccccgtggagagcctggaaacaaccatgaggtccccggtgtttacggacaactcctccccaccagcggtgccccagaccttccaggtggcccatttgcatctcccacaggcagcggcaagagcaccaaagtcccggctgcatatgcagctcagggttataaggtgctagtgctcaacccctctgtcgctgcaacattgggctttggtgcctacatgtctaaggcccagggattgatcctaacatcaggaccggggtgaggacaattaccactggcagccccatcacgtactccacctacggtaagttccttgccgacggcgggtgctcagggggcgcttatgacataataatctgtgacgagtgccatccacggatgccacatccatcttgggcatcggcactgtccttgaccaagcagagaccgcgggggcgagactggttgtgctcgccaccgctacccctccgggctctatcactgtgccacatcccaacatgaggaggttgctctgtccaccaccggagagatccctttttacggcaaggccatcccccttgatgtaatcaagggggggagacatctcattttctgtcactcaaagaagaagtgtgacgagcttgccgcaaagctggtcgcatgggcgtcaatgccgtggcctactaccgcggtctcgacgtatctgtcatcccgaccggcggcgatgttgtcgtcgtggcaactgatgctctcatgaccggctttactggcgacttcgactcggtgatgactgcaacacgtgcgtcacccagacagtcgatttcagccttgaccctaccttcaccattgagacaaccacgcttccccaggatgctgtctcccgcactcaacgtcggggcaggactggcagggggaggcaaggcacctacgatttgtggcaccgggggagcgcccctctggcatgttcgactcgtctgtcctctgtgagtgctatgacgcgggctgtgcttggtacgagctcacgcctgccgagaccacagttaggctacgagcgtaatgaacaccccggggcttcccgtgtgtcaagaccatcttgaattttgggagggcgtctttacaggcctcacccatatagatgcccacttcctatcccagacaaaacagagcggggagaatcttccttacctggtagcgtacaagccaccgtgtgcgctagggcgcaagccccccccccatcgtgggaccagatgtggaagtgtttggtccgcctcaaacccaccctccacgggccaacacccctgctatacagactgggtgctgttcaaatgaagtcaccctgacgcacccagtcaccaaatacatcatgacatgtatgtcggctga

SEQ ID NO: 497 - DNA, 4870 bp, Hepatitis C virus
tcgcccacaggacgtcaagttcccgggcggcggccagatcgttggtggagtttacttgttgccgcgcaggggccctagattgggtgtgcgcgcgacgaggaagacttccgagcggtcgcaacctcgagtagacgtcagcctatccccaaggcgcgtcggtccgagggcaggacctgggctcagcccgggtacccttggcccctctatggcaatgagggttgcggatgggcgggatggctcctgtccccccgtggtctcggcctagctggggccccacagacccccggcgtaggtcgcgcaatttgggcaaggtcatcgataccctcacgtgcggcttcgccgacctcatggggtacataccgctcgtcggcgcccctcttgggggcgctgccaggccctggcgcatggagtccgggttctggaagacggcgatgaattatgcaacagggaacctccccggttgctctttctctatcttccttctggccttgctctcttgcctgactgtgcccgcttcagcctccaagtgcgcaactccacggggctttaccatgtcaccaatgattgccctaattcgagtattgtgtacgaggcggccgatgctatcctgcacaccccggggtgtgtcccttgcgttcgtaagggtaacacctcggtgtgttggtggcggtaacccctacggtggccaccagggacggcaaactccccacaacgcagcttcgacgtcatatcgatctgctcgtcgggagtgccaccctctgttcggccctctatgtgggggacctgtgcggtctgtctttcttgttggccaactgtttaccctctctcccagacgccactggacaacgcaaggctgcaattgttccatctatcccggccatataacgggccaccgcatggcatgggatatgatgatgaactggtcccctacacggcgttggtaatggcacagctgctccggatcccacaagccatcatggacatgatcgctggtgctcactggggagtcctggcgggcatagcgtatttctctatggtggggaactgggcgaaggtccggtagtgctgctgctatttgccggcgtcgacgcaaaaacttatgtcaccgggggagctgctgcccacaccacgtccggacttgctgggctcttcttacaaggccccaagcagaacgtccacttgatcaacaccaacggcagtggcacatcaatagtacggccttgaactgcaacgctagccttgacaccggctggatagcagggcttttctattacaacaaattcaactcttcaggttgtcccgagaggttggccagctgccgactcctactgattttgaccagggctggggccctatcagtcatgccaacggaagcggccccgaccaacgcccctactgctggcactaccccccaaaaccttgcggcattgtgcccgcgaagagtgtgtgtggcccggtatattgcttactcccagccctgtggtggtgggaacgaccgacaggtcgggcgaacctacctacaactggggtgaaaatgatacggacgtcttcgtccttaacaacatcaggccaccgctgggtaattggtttggtttacctggatgaactcaaccggattcaccaaagtgtgcggggcgcctccttgtgacatcgggggggcgggcaacaacaccttgcactgccccactgattgtttccgcaagcatccggaagccacgtactctcggtgcggctcggtccctggatcacgcccaggtgcctggtccactacccatacaggctttggcattatccctgtaccatcaactacaccatatttaaagtcaggatgtacgtgggagggatcgagcacaggttggaagtgcctgcaactggacgcggggcgagcgttgcgatctggaagacagggacaggtccgagcttagcccgttgctgctgtctaccacacagtggcaagtccttccgtgttccttcacggccatgccagccttgtccaccggcctatccacctccaccagaacattgtggatgtgcagtatttgtacggggtggggtcaagcattgcgtcctgggccattaagtgggagtacgtcgttctcctgttccttttgcttgcagacgcgcgcgtctctcctgcttgtggatgatgttactcatatcccaagcggaggcggctttggagaaccttgtaatactcaatgcagcatccctggccgggacgcacggtcttgtatccttcctcgtgttcttctgctttgcatggtatctgaaggcaggtgggtgcccggagcggcttacgccttctacgggatgtggcctctcctcctgctcctgctggcgttgccccagcgggcatacgcgctggacacggaggtggccgcgtcgtgtggcggcgttgccttgtcgggttaatggcgctgactttatcaccacactacaagcgctatatcagctggtgcttatggtggcttcagtattttctgaccagagcggaagcgcagctgcacgtgtgggttccccccctcaacgtccgggggggcgtgacgctgtcatcttactcatgtgtgttgtacacccgactctggtattcgacatcaccaaaatgctgctggccgtctatggacccctctggattcttcaagccagtttgcttgaggtaccctacttgtgcgcgtccaaggccttctccggatctgcgcgctagcgcggaagatggtcggaggccattacgtgcaaatggccatcatcaagttaggggcgcttactggcacctatatttataatcatctcacccctcttcaggactggcgcacaacggcctgcgagacctggccgcggctgtagagccagtcgtcttctcccaaatggagaccaagctcatcacgtggggggcagacactgccgcgtgcggtgacattgtcgacggcttacccgctccgcccgtaggggccgggagatactgcttgggccggccgatggaatggtctccaaggggtggaggttgctggcgcccatcacggcgtacgcccagcagacaaggggcctcctagggtgtataatcaccagcctaactggcgggacaaaaaccaagtggaaggtgaggtccagattgtgtcgactgctgcccaaactttcctggcaacgtgcatcaatggggtatgctggactgtctaccacggggccggaacgaggaccatcgcatacccaagggtcctgttatccagatgtataccaatgtagaccaagaccttgtgggctggcccgctcctcaaggtgcccgctcattgacaccctgcacctgcggctcctcggacctttacttggtcacgaggcacgccgatgtattcccgtgcgccggcggggtgatagcaggggcagcctgctctcgccccggcctatttcctacttgaaaggctcctcgggaggtccgctgttgtgccccgcgggacacgccgtgggcatatttagggcgcggtgtgtacccgtggagtggctaaggcggtggactttatccccgtggagagcctggaaacaaccatgaggtccccggtgtttacggacaactcctccccaccagcggtgccccagaccttccaggtggcccatttgcagctcccacaggcagcggcaagagcaccaaagtcccggctgcatatgcagctcagggttataaggtgctagtgctcaacccctctgtcgctgcaacattgggctttggtgcctacatgtctaaggccctgggatcgatcctaacatcaggaccggggtgaggacaattaccactggcagccccatcacgtactccacctacggtaagttccttgccgacggcgggtgctcagggggcgcttatgacataataatctgtgacgagtgccatccacggatgccacatccatcttgggcatcggcactgtccttgaccaagcagagaccgcgggggcgagactggttgtgctcgccaccgctacccctccgggctctatcactgtgccacatcccaacacgaggaggttgctctgtccaccaccggagagatccctttttacggcaaggccatcccccttgatgtaatcaagggggggagacatctcattttctgtcactcaaagaagaagtgtgacgagcttgccgcaaagctggtcgcttgggcgtcaatgccgtggcctactaccgcggtctcgacgtatctgtcatcccgaccggcggcgatgttgtcgtcgtggcaactgatgctctcatgaccggctttactggcgacttcgactcggtgaagactgcaacacgtgcgtcacccagacagtcgatttcagccttgaccctaccttcaccattgagacaaccacgcttccccaggatgctgtctcccgcactcaacgtcggggcaggactggcagggggaggcaaggcacctaagatttgtggcaccgggggagcgcccctctggcatgttcgactcgtctgtcctctgtgagtgctatgacgcgggctgtgcttggtacgagctcacgcctgccgagaccacagttaggctacgagcgttatgaacaccccggggcttcccgtgtgtcaagaccatcttgaattttgggagggcgtctttacaggcctcacccatatagatgcccacttcctatcccagacaaaacagagcggggagaatcttccttacctggtagcgtacaagccaccgtgtgcgctagggcgcaagccccccccccatcgtgggaccagatgtggaagtgtttggtccgcctcaaacccaccctccacgggccaacacccctgctatacagactgggtgctgttcaaatgaagtcaccctgacgcacccagtcaccaaatacatcatgacatgtatgtcggctga

SEQ ID NO: 498 - DNA, 4869 bp, Hepatitis C virus
tcgcccacaggacgtcaagttcccgggcggcggccagatcgttggtggagtttacttgttgccgcgcaggggccctagattgggtgtgcgcgcgacgaggaagacttccgagcggtcgcaacctcgagtagacgtcagcctatccccaaggcgcgtcggtccgagggcaggacctgggctcagcccgggtacccttggcccctctatggcaatgagggttgcggatgggcgggatggctcctgtccccccgtggtctcggcctagctggggccccacagacccccggcgtaggtcgcgcaatttgggcaaggtcatcgataccctcacgtgcggcttcgccgacctcatggggtacataccgctcgtcggcgcccctcttgggggcgctgccaggccctggcgcatggagtccgggttctggaagacggcgtgaattatgcaacagggaacctccccggttgctctttctctatcttccttctggccttgctctcttgcctgactgtgcccgcttcagcctacaagtgcgcaactccacggggctttaccatgtcaccaatgattgccctaattcgagtattgtgtacgaggcggccgatgctatcctgcacaccccggggtgtgtcccttgcgttcgtaagggtaacacctcggtgtgttggtggcggtaacccctacggtggccaccagggacggcaaactccccacaacgcagcttcgacgtcatatcgatctgctcgtcgggagtgccaccctctgttcggccctctatgtgggggacctgtgcggtctgtctttcttgttggccaactgtttaccctctctcccagacgccactggacaacgcaaggctgcaattgttccatctatcccggccatataacgggccaccgcatggcatgggatatgatgatgaactggtcccctacacggcgttggtaatggcacagctgctccggatcccacaagccatcatggacatgatcgctggtgctcactggggagtcctggcgggcatagcgtatttctctatggtggggaactgggcgaaggtcctgtagtgctgctgctatttgccggcgtcgacgcaaaaacttatgtcaccgggggagctgctgcccacaccacgtccggacttgctgggctcttcttacaaggccccaagcagaacgtccacttgatcaacaccaacggcagtggcacatcaatagtacggccttgaactgcaacgctagccttgacaccggctggatagcagggcttttctattacaacaaattcaactcttcaggttgtcccgagaggttggccagctgccgactcctactgattttgaccagggctggggccctatcagtcatgccaacggaagcggccccgaccaacgcccctactgctggcactaccccccaaaaccttgcggcattgtgcccgcgaagagtgtgtgtggcccggtatattgcttcctcccagccctgtggtggtgggaacgaccgacaggtcgggcgaacctacctacaactggggtgaaaatgatacggacgtcttcgtccttaacaacatcaggccaccgctgggtaattggtttggttgacctggatgaactcaaccggattcaccaaagtgtgcggggcgcctccttgtgacatcgggggggcgggcaacaacaccttgcactgccccactgattgtttccgcaagcatccggaagccacgtactctcggtgcggctccgtccctggatcacgcccaggtgcctggtccactacccatacaggctttggcattatccctgtaccatcaactacaccatatttaaagtcaggatgtacgtgggagggatcgagcacaggttggaagcgcctgcaactggacgcggggcgagcgttgcgatctggaagacagggacaggtccgagcttagcccgttgctgctgtctaccacacagtggcaagtccttccgtgttccttcacggccatgccagccttgtccaccggcctctccacctccaccagaacattgtggatgtgcagtatttgtacggggtggggtcaagcattgcgtcctgggccattaagtgggagtacgtcgttctcctgttccttttgcttgcagacgcgcgcgtctgtcctgcttgtggatgatgttactcatatcccaagcggaggcggctttggagaaccttgtaatactcaatgcagcatccctggccgggacgcacggtcttgtatccttcctcgtgttcttctgctttgcatggtatctgaaagcaggtgggtgcccggagcggcttacgccttctacgggatgtggcctctcctcctgctcctgctggcgttgccccagcgggcatacgcgctggacacggaggtggccgcgtcgtgtggcggcgttgtcttgtcgggttaatggcgctgactttatcaccacactacaagcgctatatcagctggtgcttatggtggcttcagtattttctgaccagagcggaagcgcagctgcacgtgtgggttccccccctcaacgtccgggggggggtgacgctgtcatcttactcatgtgtgttgtacacccgactctggtattcgacatcaccaaaatgctgctggccgtctatggacccctctggattcttcaagccagtttgcttgaggtaccctacttgtgcgcgtccaaggccttctccggatctgcgcgctagcgcggaagatggtcggaggccattacgtgcaaatggccatcatcaagttaggggcgcttactggcacctatatttataatcatctcacccctcttcaggactggcgcacaacggcctgcgagacctggccgcggctgtagagccagtcgttttctcccaaatggagaccaagctcatcacgtggggggcagacactgccgcgtgcggtgacattgtcgacggtttacccgttccgcccgtaggggccgggagatactgcttgggccggccgatggaatggtctccaaggggtggaggttgctggcgcccatcacggcgtacgcccagcagacaaggggcctcctagggtgtataatcaccagcctaactggcgggacaaaaaccaagtggaaggtgaggtccagattgtgtcgactgctgcccaaactttcctggcaacgtgcatcaatggggtatgctggactgtctaccacggggccggaacgaggaccatcgcatccccaagggtcctgttatccagatgtataccaatgtagaccaagaccttgtgggctggcccgctcctcaaggtgcccgctcattgacaccctgcacctgcggctcctcggacctttacttggtcacgaggcacgccgatgtcttcccgtgcgccggcggggtgatagcaggggcagcctgctctcgccccggcctatttcctacttgaaaggctcctcgggaggtccgctgttgtgccccgcgggacacgccgtgggcatatttagggcgcggtgtgtacccgtggagtggctaaggcggtggactttatccccgtggagagcctggaaacaaccatgaggtccccggtgtttacggacaactcctccccaccagcggtgccccagaccttccaggtggcccatttgcatctcccacaggcagcggcaagagcaccaaagtcccggctgcatatgcagctcagggttataaggtgctagtgctcaacccctctgtcgctgcaacattgggctttggtgcctacatgtctaaggcccagggatcgatcctaacatcaggaccggggtgaggacaattaccactggcagccccatcacgtactccacctacggtaagttccttgccgacggcgggtgctcagggggcgcttatgacataataatctgtgacgagtgccatccacggatgccacatccatcttgggcatcggcactgtccttgaccaagcagagaccgcgggggcgagactggttgtgctcgccaccgctacccctccgggctctatcactgtgccacatcccaacatgaggaggttgctctgtccaccaccggagagatccctttttacggcaaggccatcccccttgatgtaatcaagggggggagacatctcattttctgtcactcaaagaagaagtgtgacgagcttgccgcaaagctggtcgcatgggcgtcaatgccgtggcctactaccgcggtctcgacgtatctgtcatcccgaccggcggcgatgttgtcgtcgtggcaactgatgctctcatgaccggctttactggcgacttcgactcggtgatgactgcaacacgtgcgtcacccagacagtcgatttcagccttgaccctaccttcaccattgagacaaccacgcttccccaggatgctgtctcccgcactcaacgtcggggcaggactggcagggggaggcaaggcacctacgatttgtggcaccgggggagcgcccctctggcatgttcgactcgtctgtcctctgtgagtgctatgacgcgggctgtgcttggtacgagctcacgcctgccgagaccacagttaggctacgagcgtaatgaacaccccggggcttcccgtgtgtcaagaccatcttgaattttgggagggcgtctttacaggcctcacccatatagatgcccacttcctatcccagacaaaacagagcggggagaatcttccttacctggtagcgtacaagccaccgtgtgcgctagggcgcaagccccccccccatcgtgggaccagatgtggaagtgtttggtccgcctcaaacccaccctccacgggccaacacccctgctatacagactgggtgctgttcaaatgaagtcaccctgacgcacccagtcaccaaatacatcatgacatgtatgtcggctga

SEQ ID NO: 499 - DNA, 4869 bp, Hepatitis C virus
tcgcccacaggacgtcaagttcccgggcggcggccagatcgttggtggagtttacttgttgccgcgcaggggccctagattgggtgtgcgcgcgacgaggaagacttccgagcggtcgcaacctcgagtagacgtcagcctatccccaaggcgcgtcggtccgagggcaggacctgggctcagcccgggtacccttggcccctctatggcaatgagggttgcggatgggcgggatggctcctgtccccccgtggtctcggcctagctggggccccacagacccccggcgtaggtcgcgcaatttgggcaaggtcatcgataccctcacgtgcggcttcgccgacctcatggggtacataccgctcgtcggcgcccctcttgggggcgctgccaggccctggcgcatggagtccgggttctggaagacggcgtgaattatgcaacagggaacctccccggttgctctttctctatcttccttctggccttgctctcttgcctgactgtgcccgcttcagcctacaagtgcgcaactccacggggctttaccatgtcaccaatgattgccctaattcgagtattgtgtacgaggcggccgatgctatcctgcacaccccggggtgtgtcccttgcgttcgtaagggtaacacctcggtgtgttggtggcggaaacccctacggtggccaccagggacggcaaactccccacaacgcagcttcgacgtcatatcgatctgctcgtcgggagtgccaccctctgttcggccctctatgtgggggacctgtgcggtctgtctttcttgttggccaactgtttaccctctctcccagacgccactggacaacgcaaggctgcaattgttccatctatcccggccatataacgggccaccgcatggcatgggatatgatgatgaactggtcccctacacggcgttggtaatggcacagctgctccggatcccacaagccatcatggacatgatcgctggtgctcactggggagtcctggcgggcatagcgtatttctctatggtggggaactgggcgaaggtcctgtagtgctgctgctatttgccggcgtcgacgcaaaaacttatgtcaccgggggagctgctgcccacaccacgtccggacttgctgggctcttcttacaaggccccaagcagaacgtccacttgatcaacaccaacggcagtggcacatcaatagtacggccttgaactgcaacgctagccttgacaccggctggatagcagggcttttctattacaacaaattcaactcttcaggttgtcccgagaggttggccagctgccgactcctactgattttgaccagggctggggccctatcagtcatgccaacggaagcggccccgaccaacgcccctactgctggcactaccccccaaaaccttgcggcattgtgcccgcgaagagtgtgtgtggcccggtatattgcttcctcccagccctgtggtggtgggaacgaccgacaggtcgggcgaacctacctacaactggggtgaaaatgatacggacgtcttcgtccttaacaacatcaggccaccgctgggtaattggtttggttgacctggatgaactcaaccggattcaccaaagtgtgcggggcgcctccttgtgacatcgggggggcgggcaacaacaccttgcactgccccactgattgtttccgcaagcatccggaagccacgtactctcggtgcggctccgtccctggatcacgcccaggtgcctggtccactacccatacaggctttggcattatccctgtaccatcaactacaccatatttaaagtcaggatgtacgtgggagggatcgagcacaggttggaagcgcctgcaactggacgcggggcgagcgttgcgatctggaagacagggacaggtccgagcttagcccgttgctgctgtctaccacacagtggcaagtccttccgtgttccttcacggccatgccagccttgtccaccggcctctccacctccaccagaacattgtggatgtgcagtatttgtacggggtggggtcaagcattgcgtcctgggccattaagtgggagtacgtcgttctcctgttccttttgcttgcagacgcgcgcgtctgtcctgcttgtggatgatgttactcatatcccaagcggaggcggctttggagaaccttgtaatactcaatgcagcatccctggccgggacgcacggtcttgtatccttcctcgtgttcttctgctttgcatggtatctgaaagcaggtgggtgcccggagcggcttacgccttctacgggatgtggcctctcctcctgctcctgctggcgttgccccagcgggcatacgcgctggacacggaggtggccgcgtcgtgtggcggcgttgtcttgtcgggttaatggcgctgactttatcaccacactacaagcgctatatcagctggtgcttatggtggcttcagtattttctgaccagagcggaagcgcagctgcacgtgtgggttccccccctcaacgtccgggggggggtgacgctgtcatcttactcatgtgtgttgtacacccgactctggtattcgacatcaccaaaatgctgctggccgtctatggacccctctggattcttcaagccagtttgcttgaggtaccctacttgtgcgcgtccaaggccttctccggatctgcgcgctagcgcggaagatggtcggaggccattacgtgcaaatggccatcatcaagttaggggcgcttactggcacctatatttataatcatctcacccctcttcaggactggcgcacaacggcctgcgagacctggccgcggctgtagagccagtcgttttctcccaaatggagaccaagctcatcacgtggggggcagacactgccgcgtgcggtgacattgtcgacggcttacccgttccgcccgtaggggccgggagatactgcttgggccggccgatggaatggtctccaaggggtggaggttgctggcgcccatcacggcgtacgcccagcagacaaggggcctcctagggtgtataatcaccagcctaactggcgggacaaaaaccaagtggaaggtgaggtccagattgtgtcgactgctgcccaaactttcctggcaacgtgcatcaatggggtatgctggactgtctaccacggggccggaacgaggaccatcgcatccccaagggtcctgttatccagatgtataccaatgtagaccaagaccttgtgggctggcccgctcctcaaggtgcccgctcattgacaccctgcacctgcggctcctcggacctttacttggtcacgaggcacgccgatgtcttcccgtgcgccggcggggtgatagcaggggcagcctgctctcgccccggcctatttcctacttgaaaggctcctcgggaggtccgctgttgtgccccgcgggacacgccgtgggcatatttagggcgcggtgtgtacccgtggagtggctaaggcggtggactttatccccgtggagagcctggaaacaaccatgaggtccccggtgtttacggacaactcctccccaccagcggtgccccagaccttccaggtggcccatttgcatctcccacaggcagcggcaagagcaccaaagtcccggctgcatatgcagctcagggttataaggtgctagtgctcaacccctctgtcgctgcaacattgggctttggtgcctacatgtctaaggcccagggatcgatcctaacatcaggaccggggtgaggacaattaccactggcagccccatcacgtactccacctacggtaagttccttgccgacggcgggtgctcagggggcgcttatgacataataatctgtgacgagtgccatccacggatgccacatccatcttgggcatcggcactgtccttgaccaagcagagaccgcgggggcgagactggttgtgctcgccaccgctacccctccgggctctatcactgtgccacatcccaacatgaggaggttgctctgtccaccaccggagagatccctttttacggcaaggccatcccccttgatgtaatcaagggggggagacatctcattttctgtcactcaaagaagaagtgtgacgagcttgccgcaaagctggtcgcatgggcgtcaatgccgtggcctactaccgcggtctcgacgtatctgtcatcccgaccggcggcgatgttgtcgtcgtggcaactgatgctctcatgaccggctttactggcgacttcgactcggtgatgactgcaacacgtgcgtcacccagacagtcgatttcagccttgaccctaccttcaccattgagacaaccacgcttccccaggatgctgtctcccgcactcaacgtcggggcaggactggcagggggaggcaaggcacctacgatttgtggcaccgggggagcgcccctctggcatgttcgactcgtctgtcctctgtgagtgctatgacgcgggctgtgcttggtacgagctcacgcctgccgagaccacagttaggctacgagcgtaatgaacaccccggggcttcccgtgtgtcaagaccatcttgaattttgggagggcgtctttacaggcctcacccatatagatgcccacttcctatcccagacaaaacagagcggggagaatcttccttacctggtagcgtacaagccaccgtgtgcgctagggcgcaagccccccccccatcgtgggaccagatgtggaagtgtttggtccgcctcaaacccaccctccacgggccaacacccctgctatacagactgggtgctgttcaaatgaagtcaccctgacgcacccagtcaccaaatacatcatgacatgtatgtcggctga

SEQ ID NO: 500 - DNA, 4869 bp, Hepatitis C virus
tcgcccacaggacgtcaagttcccgggcggcggccagatcgttggtggagtttacttgttgccgcgcaggggccctagattgggtgtgcgcgcgacgaggaagacttccgagcggtcgcaacctcgagtagacgtcagcctatccccaaggcgcgtcggtccgagggcaggacctgggctcagcccgggtacccttggcccctctatggcaatgagggttgcggatgggcgggatggctcctgtccccccgtggtctcggcctagctggggccccacagacccccggcgtaggtcgcgcaatttgggcaaggtcatcgataccctcacgtgcggcttcgccgacctcatggggtacataccgctcgtcggcgcccctcttgggggcgctgccaggccctggcgcatggagtccgggttctggaagacggcgtgaattatgcaacagggaacctccccggttgctctttctctatcttccttctggccttgctctcttgcctgactgtgcccgcttcagcctacaagtgcgcaactccacggggctttaccatgtcaccaatgattgccctaattcgagtattgtgtacgaggcggccgatgctatcctgcacaccccggggtgtgtcccttgcgttcgtaagggtaacacctcggtgtgttggtggcggtaacccctacggtggccaccagggacggcaaactccccacaacgcagcttcgacgtcatatcgatttgctcgtcgggagtgccaccctctgttcggccctctatgtgggggacctgtgcggtctgtctttcttgttggccaactgtttaccctctctcccagacgccactggacaacgcaaggctgcaattgttccatctatcccggccatataacgggccaccgcatggcatgggatatgatgatgaactggtcccctacacggcgttggtaatggcacagctgctccggatcccacaagccatcatggacatgatcgctggtgctcactggggagtcctggcgggcatagcgtatttctctatggtggggaactgggcgaaggtcctgtagtgctgctgctatttgccggcgtcgacgcaaaaacttatgtcaccgggggagctgctgcccacaccacgtccggacttgctgggctcttcttacaaggccccaagcagaacgtccacttgatcaacaccaacggcagtggcacatcaatagtacggccttgaactgcaacgctagccttgacaccggctggatagcagggcttttctattacaacaaattcaactcttcaggttgtcccgagaggttggccagctgccgactcctactgattttgaccagggctggggccctatcagtcatgccaacggaagcggccccgaccaacgcccctactgctggcactaccccccaaaaccttgcggcattgtgcccgcgaagagtgtgtgtggcccggtatattgcttcctcccagccctgtggtggtgggaacgaccgacaggtcgggcgaacctacctacaactggggtgaaaatgatacggacgtcttcgtccttaacaacatcaggccaccgctgggtaattggtttggttgacctggatgaactcaaccggattcaccaaagtgtgcggggcgcctccttgtgacatcgggggggcgggcaacaacaccttgcactgccccactgattgtttccgcaagcatccggaagccacgtactctcggtgcggctccgtccctggatcacgcccaggtgcctggtccactacccatacaggctttggcattatccctgtaccatcaactacaccatatttaaagtcaggatgtacgtgggagggatcgagcacaggttggaagcgcctgcaactggacgcggggcgagcgttgcgatctggaagacagggacaggtccgagcttagcccgttgctgctgtctaccacacagtggcaagtccttccgtgttccttcacggccatgccagccttgtccaccggcctctccacctccaccagaacattgtggatgtgcagtatttgtacggggtggggtcaagcattgcgtcctgggccattaagtgggagtacgtcgttctcctgttccttttgcttgcagacgcgcgcgtctgtcctgcttgtggatgatgttactcatatcccaagcggaggcggctttggagaaccttgtaatactcaatgcagcatccctggccgggacgcacggtcttgtatccttcctcgtgttcttctgctttgcatggtatctgaaagcaggtgggtgcccggagcggcttacgccttctacgggatgtggcctctcctcctgctcctgctggcgttgccccagcgggcatacgcgctggacacggaggtggccgcgtcgtgtggcggcgttgtcttgtcgggttaatggcgctgactttatcaccacactacaagcgctatatcagctggtgcttatggtggcttcagtattttctgaccagagcggaagcgcagctgcacgtgtgggttccccccctcaacgtccgggggggggtgacgctgtcatcttactcatgtgtgttgtacacccgactctggtattcgacatcaccaaaatgctgctggccgtctatggacccctctggattcttcaagccagtttgcttgaggtaccctacttgtgcgcgtccaaggccttctccggatctgcgcgctagcgcggaagatggtcggaggccattacgtgcaaatggccatcatcaagttaggggcgcttactggcacctatatttataatcatctcacccctcttcaggactggcgcacaacggcctgcgagacctggccgcggctgtagagccagtcgttttctcccaaatggagaccaagctcatcacgtggggggcagacactgccgcgtgcggtgacattgtcgacggcttacccgttccgcccgtaggggccgggagatactgcttgggccggccgatggaatggtctccaaggggtggaggttgctggcgcccatcacggcgtacgcccagcagacaaggggcctcctagggtgtataatcaccagcctaactggcgggacaaaaaccaagtggaaggtgaggtccagattgtgtcgactgctgcccaaactttcctggcaacgtgcatcaatggggtatgctggactgtctaccacggggccggaacgaggaccatcgcatccccaagggtcctgttatccagatgtataccaatgtagaccaagaccttgtgggctggcccgctcctcaaggtgcccgctcattgacaccctgcacctgcggctcctcggacctttacttggtcacgaggcacgccgatgtcttcccgtgcgccggcggggtgatagcaggggcagcctgctctcgccccggcctatttcctacttgaaaggctcctcgggaggtccgctgttgtgccccgcgggacacgccgtgggcatatttagggcgcggtgtgtacccgtggagtggctaaggcggtggactttatccccgtggagagcctggaaacaaccatgaggtccccggtgtttacggacaactcctccccaccagcggtgccccagaccttccaggtggcccatttgcatctcccacaggcagcggcaagagcaccaaagtcccggctgcatatgcagctcagggttataaggtgctagtgctcaacccctctgtcgctgcaacattgggctttggtgcctacatgtctaaggcccagggatcgatcctaacatcaggaccggggtgaggacaattaccactggcagccccatcacgtactccacctacggtaagttccttgccgacggcgggtgctcagggggcgcttatgacataataatctgtgacgagtgccatccacggatgccacatccatcttgggcatcggcactgtccttgaccaagcagagaccgcgggggcgagactggttgtgctcgccaccgctacccctccgggctctatcactgtgccacatcccaacatgaggaggttgctctgtccaccaccggagagatccctttttacggcaaggccatcccccttgatgtaatcaagggggggagacatctcattttctgtcactcaaagaagaagtgtgacgagcttgccgcaaagctggtcgcatgggcgtcaatgccgtggcctactaccgcggtctcgacgtatctgtcatcccgaccggcggcgatgttgtcgtcgtggcaactgatgctctcatgaccggctttactggcgacttcgactcggtgatgactgcaacacgtgcgtcacccagacagtcgatttcagccttgaccctaccttcaccattgagacaaccacgcttccccaggatgctgtctcccgcactcaacgtcggggcaggactggcagggggaggcaaggcacctacgatttgtggcaccgggggagcgcccctctggcatgttcgactcgtctgtcctctgtgagtgctatgacgcgggctgtgcttggtacgagctcacgcctgccgagaccacagttaggctacgagcgtaatgaacaccccggggcttcccgtgtgtcaagaccatcttgaattttgggagggcgtctttacaggcctcacccatatagatgcccacttcctatcccagacaaaacagagcggggagaatcttccttacctggtagcgtacaagccaccgtgtgcgctagggcgcaagccccccccccatcgtgggaccagatgtggaagtgtttggtccgcctcaaacccaccctccacgggccaacacccctgctatacagactgggtgctgttcaaatgaagtcaccctgacgcacccagtcaccaaatacatcatgacatgtatgtcggctga

SEQ ID NO: 501 - DNA, 4869 bp, Hepatitis C virus
tcgcccacaggacgtcaagttcccgggcggcggccagatcgttggtggagtttacttgttgccgcgcaggggccctagattgggtgtgcgcgcgacgaggaagacttccgagcggtcgcaacctcgagtagacgtcagcctatccccaaggcgcgtcggtccgagggcaggacctgggctcagcccgggtacccttggcccctctatggcaatgagggttgcggatgggcgggatggctcctgtccccccgtggtctcggcctagctggggccccacagacccccggcgtaggtcgcgcaatttgggcaaggtcatcgataccctcacgtgcggcttcgccgacctcatggggtacataccgctcgtcggcgcccctcttgggggcgctgccaggccctggcgcatggagtccgggttctggaagacggcgtgaattatgcaacagggaacctccccggttgctctttctctatcttccttctggccttgctctcttgcctgactgtgcccgcttcagcctacaagtgcgcaactccacggggctttaccatgtcaccaatgattgccctaattcgagtattgtgtacgaggcggccgatgctatcctgcacaccccggggtgtgtcccttgcgttcgtaagggtaacacctcggtgtgttggtggcggtaacccctacggtggccaccagggacggcaaactccccacaacgcagcttcgacgtcatatcgatctgctcgtcgggagtgccaccctctgttcggccctctatgtgggggacctgtgcggtctgtctttcttgttggccaactgtttaccctctctcccagacgccactggacaacgcaaggctgcaattgttccatctatcccggccatataacgggccaccgcatggcatgggatatgatgatgaactggtcccctacacggcgttggtaatggcacagctgctccggatcccacaagccatcatggacatgatcgctggtgctcactggggagtcctggcgggcatagcgtatttctctatggtggggaactgggcgaaggtcctgtagtgctgctgctatttgccggcgtcgacgcaaaaacttatgtcaccgggggagctgctgcccacaccacgtccggacttgctgggctcttcttacaaggccccaagcagaacgtccacttgatcaacaccaacggcagtggcacatcaatagtacggccttgaactgcaacgctagccttgacaccggctggatagcagggcttttctattacaacaaattcaactcttcaggttgtcccgagaggttggccagctgccgactcctactgattttgaccagggctggggccctatcagtcatgccaacggaagcggccccgaccaacgcccctactgctggcactaccccccaaaaccttgcggcattgtgcccgcgaagagtgtgtgtggcccggtatattgcttcctcccagccctgtggtggtgggaacgaccgacaggtcgggcgaacctacctacaactggggtgaaaatgatacggacgtcttcgtccttaacaacatcaggccaccgctgggtaattggtttggttgacctggatgaactcaaccggattcaccaaagtgtgcggggcgcctccttgtgacatcgggggggcgggcaacaacaccttgcactgccccactgattgtttccgcaagcatccggaagccacgtactctcggtgcggctccgtccctggatcacgcccaggtgcctggtccactacccatacaggctttggcattatccctgtaccatcaactacaccatatttaaagtcaggatgtacgtgggagggatcgagcacaggttggaagcgcctgcaactggacgcggggcgagcgttgcgatctggaagacagggacaggtccgagcttagcccgttgctgctgtctaccacacagtggcaagtccttccgtgttccttcacggccatgccagccttgtccaccggcctctccacctccaccagaacattgtggatgtgcagtatttgtacggggtggggtcaagcattgcgtcctgggccattaagtgggagtacgtcgttctcctgttccttttgcttgcagacgcgcgcgtctgtcctgcttgtggatgatgttactcatatcccaagcggaggcggctttggagaaccttgtaatactcaatgcagcatccctggccgggacgcacggtcttgtatccttcctcgtgttcttctgctttgcatggtatctgaaagcaggtgggtgcccggagcggcttacgccttctacgggatgtggcctctcctcctgctcctgctggcgttgccccagcgggcatacgcgctggacacggaggtggccgcgtcgtgtggcggcgttgtcttgtcgggttaatggcgctgactttatcaccacactacaagcgctatatcagctggtgcttatggtggcttcagtattttctgaccagagcggaagcgcagctgcacgtgtgggttccccccctcaacgtccgggggggggtgacgctgtcatcttactcatgtgtgttgtacacccgactctggtattcgacatcaccaaaatgctgctggccgtctatggacccctctggattcttcaagccagtttgcttgaggtaccctacttgtgcgcgtccaaggccttctccggatctgcgcgctagcgcggaagatggtcggaggccattacgtgcaaatggccatcatcaagttaggggcgcttactggcacctatatttataatcatctcacccctcttcaggactggcgcacaacggcctgcgagacctggccgcggctgtagagccagtcgttttctcccaaatggagaccaagctcatcacgtggggggcagacactgccgcgtgcggtgacattgtcgacggcttacccgttccgcccgtaggggccgggagatactgcttgggccggccgatggaatggtctccaaggggtggaggttgctggcgcccatcacggcgtacgcccagcagacaaggggcctcctagggtgtataatcaccagcctaactggcgggacaaaaaccaagtggaaggtgaggtccagattgtgtcgactgctgcccaaactttcctggcaacgtgcatcaatggggtatgctggactgtctaccacggggccggaacgaggaccatcgcatccccaagggtcctgttatccagatgtataccaatgtagaccaagaccttgtgggctggcccgctcctcaaggtgcccgctcattgacaccctgcacctgcggctcctcggacctttacttggtcacgaggcacgccgatgtcttcccgtgcgccggcggggtgatagcaggggcagcctgctctcgccccggcctatttcctacttgaaaggctcctcgggaggtccgctgttgtgccccgcgggacacgccgtgggcatatttagggcgcggtgtgtacccgtggagtggctaaggcggtggactttatccccgtggagagcctggaaacaaccatgaggtccccggtgtttacggacaactcctccccaccagcggtgccccagaccttccaggtggcccatttgcatctcccacaggcagcggcaagagcaccaaagtcccggctgcatatgcagctcagggttataaggtgctagtgctcaacccctctgtcgctgcaacattgggctttggtgcctacatgtctaaggcccagggatcgatcctaacatcaggaccggggtgaggacaattaccactggcagccccatcacgtactccacctacggtaagttccttgccgacggcgggtgctcagggggcgcttatgacataataatctgtgacgagtgccatccacggatgccacatccatcttgggcatcggcactgtccttgaccaagcagagaccgcgggggcgagactggttgtgctcgccaccgctacccctccgggctctatcactgtgccacatcccaacatgaggaggttgctctgtccaccaccggagagatccctttttacggcaaggccatcccccttgatgtaatcaagggggggagacatctcattttctgtcactcaaagaagaagtgtgacgagcttgccgcaaagctggtcgcatgggcgtcaatgccgtggcctactaccgcggtctcgacgtatctgtcatcccgaccggcggcgatgttgtcgtcgtggcaactgatgctctcatgaccggctttactggcgacttcgactcggtgatgactgcaacacgtgcgtcacccagacagtcgatttcagccttgaccctaccttcaccattgagacaaccacgcttccccaggatgctgtctcccgcactcaacgtcggggcaggactggcagggggaggcaaggcacctacgatttgtggcaccgggggagcgcccctctggcatgttcgactcgtctgtcctctgtgagtgctatgatgcgggctgtgcttggtacgagctcacgcctgccgagaccacagttaggctacgagcgtaatgaacaccccggggcttcccgtgtgtcaagaccatcttgaattttgggagggcgtctttacaggcctcacccatatagatgcccacttcctatcccagacaaaacagagcggggagaatcttccttacctggtagcgtacaagccaccgtgtgcgctagggcgcaagccccccccccatcgtgggaccagatgtggaagtgtttggtccgcctcaaacccaccctccacgggccaacacccctgctatacagactgggtgctgttcaaatgaagtcaccctgacgcacccagtcaccaaatacatcatgacatgtatgtcggctga

SEQ ID NO: 502 - DNA, 4869 bp, Hepatitis C virus
tcgcccacaggacgtcaagttcccgggcggcggccagatcgttggtggagtttacttgttgccgcgcaggggccctagattgggtgtgcgcgcgacgaggaagacttccgagcggtcgcaacctcgagtagacgtcagcctatccccaaggcgcgtcggtccgagggcaggacctgggctcagcccgggtacccttggcccctctatggcaatgagggttgcggatgggcgggatggctcctgtccccccgtggtctcggcctagctggggccccacagacccccggcgtaggtcgcgcaatttgggcaaggtcatcgataccctcacgtgcggcttcgccgacctcatggggtacataccgctcgtcggcgcccctcttgggggcgctgccaggccctggcgcatggagtccgggttctggaagacggcgtgaattatgcaacagggaacctccccggttgctctttctctatcttccttctggccttgctctcttgcctgactgtgcccgcttcagcctacaagtgcgcaactccacggggctttaccatgtcaccaatgattgccctaattcgagtattgtgtacgaggcggccgatgctatcctgcacaccccggggtgtgtcccttgcgttcgtaagggtaacacctcggtgtgttggtggcggtaacccctacggtggccaccagggacggcaaactccccacaacgcagcttcgacgtcatatcgatctgctcgtcgggagtgccaccctctgttcggccctctatgtgggggacctgtgcggtctgtctttcttgttggccaactgtttaccctctctcccagacgccactggacaacgcaaggctgcaattgttccatctatcccggccatataacgggccaccgcatggcatgggatatgatgatgaactggtcccctacacggcgttggtaatggcacagctgctccggatcccacaagccatcatggacatgatcgctggtgctcactggggagtcctggcgggcatagcgtatttctctatggtggggaactgggcgaaggtcctgtagtgctgctgctatttgccggcgtcgacgcaaaaacttatgtcaccgggggagctgctgcccacaccgcgtccggacttgctgggctcttcttacaaggccccaagcagaacgtccacttgatcaacaccaacggcagtggcacatcaatagtacggccttgaactgcaacgctagccttgacaccggctggatagcagggcttttctattacaacaaattcaactcttcaggttgtcccgagaggttggccagctgccgactcctactgattttgaccagggctggggccctatcagtcatgccaacggaagcggccccgaccaacgcccctactgctggcactaccccccaaaaccttgcggcattgtgcccgcgaagagtgtgtgtggcccggtatactgcttcctcccagccctgtggtggtgggaacgaccgacaggtcgggcgaacctacctacaactggggtgaaaatgatacggacgtcttcgtccttaacaacatcaggccaccgctgggtaattggtttggttgacctggatgaactcaactggattcaccaaagtgtgcggggcgcctccttgtgacatcgggggggcgggcaacaacaccttgcactgccccactgattgtttccgcaagcatccggaagccacgtactctcggtgcggctccgtccctgggtcacgcccaggtgcctggtccactacccatacaggctttggcattatccctgtaccatcaactacaccatatttaaagtcaggatgtacgtgggagggatcgagcacaggttggaagcgcctgcaactggacgcggggcgagcgttgcgatctggaagacagggacaggtccgagcttagcccgttgctgctgtctaccacacagtggcaagtccttccgtgttccttcacggccatgccagccttgtccaccggcctctccacctccaccagaacattgtggatgtgcagtatttgtacggggtggggtcaagcattgcgtcctgggccattaagtgggagtacgtcgttctcctgttccttttgcttgcagacgcgcgcgtctgtcctgcttgtggatgatgttactcatatcccaagcggaggcggctttggagaaccttgtaatactcaatgcagcatccctggccgggacgcacggtcttgtatccttcctcgtgttcttctgctttgcatggtatctgaaagcaggtgggtgcccggagcggcttacgccttctacgggatgtggcctctcctcctgctcctgctggcgttgccccagcgggcatacgcgctggacacggaggtggccgcgtcgtgtggcggcgttgtcttgtcgggttaatggcgctgactttatcaccacactacaagcgctatatcagctggtgcttatggtggcttcagtattttctgaccagagcggaagcgcagctgcacgtgtgggttccccccctcaacgtccgggggggggtgacgctgtcatcttactcatgtgtgttgtacacccgactctggtattcgacatcaccaaaatgctgctggccgtctatggacccctctggattcttcaagccagtttgcttgaggtaccctacttgtgcgcgtccaaggccttctccggatctgcgcgctagcgcggaagatggtcggaggccattacgtgcaaatggccatcatcaagttaggggcgcttactggcacctatatttataatcatctcacccctcttcaggactggcgcacaacggcctgcgagacctggccgcggctgtagagccagtcgtcttctcccaaatggagaccaagctcatcacgtggggggcagacactgccgcgtgcggtgacattgtcgacggcttacccgttccgcccgtaggggccgggagatactgcttgggccggccgatggaatggtctccaaggggtggaggttgctggcgcccatcacggcgtacgcccagcagacaaggggcctcctagggtgtataatcaccagcctaactggcgggacaaaaaccaagtggaaggtgaggtccagattgtgtcgactgctgcccaaactttcctggcaacgtgcatcaatggggtatgctggactgtctaccacggggccggaacgaggaccatcgcatccccaagggtcctgttatccagatgtataccaatgtagaccaagaccttgtgggctggcccgctcctcaaggtgcccgctcattgacaccctgcacctgcggctcctcggacctttacttggtcacgaggcacgccgatgtcttcccgtgcgccggcggggtgatagcaggggcagcctgctctcgccccggcctatttcctacttgaaaggctcctcgggaggtccgctgttgtgccccgcgggacacgccgtgggcatatttagggcgcggtgtgtacccgtggagtggctaaggcggtggactttatccccgtggagagcctggaaacaaccatgaggtccccggtgtttacggacaactcctccccaccagcggtgccccagaccttccaggtggcccatttgcatctcccacaggcagcggcaagagcaccaaagtcccggctgcatatgcagctcagggttataaggtgctagtgctcaacccctctgtcgctgcaacattgggctttggtgcctacatgtctaaggcccagggatcgatcctaacatcaggaccggggtgaggacaattaccactggcagccccatcacgtactccacctacggtaagttccttgccgacggcgggtgctcagggggcgcttatgacataataatctgtgacgagtgccatccacggatgccacatccatcttgggcatcggcactgtccttgaccaagcagagaccgcgggggcgagactggttgtgctcgccaccgctacccctccgggctctatcactgtgccacatcccaacatgaggaggttgctctgtccaccaccggagagatccctttttacggcaaggccatcccccttgatgtaatcaagggggggagacatctcattttctgtcactcaaagaagaagtgtgacgagcttgccgcaaagctggtcgcatgggcgtcaatgccgtggcctactaccgcggtctcgacgtatctgtcatcccgaccggcggcgatgttgtcgtcgtggcaactgatgctctcatgaccggctttactggcgacttcgactcggtgatgactgcaacacgtgcgtcacccagacagtcgatttcagccttgaccctaccttcaccattgagacgaccacgcttccccaggatgctgtctcccgcactcaacgtcggggcaggactggcagggggaggcaaggcacctacgatttgtggcaccgggggagcgcccctctggcatgttcgactcgtctgtcctctgtgagtgctatgacgcgggctgtgcttggtacgagctcacgcctgccgagaccacagttaggctacgagcgtaatgaacaccccggggcttcctgtgtgtcaagaccatcttgaattttgggagggcgtctttacaggcctcacccatatagatgcccacttcctatcccagacaaaacagagcggggagaatcttccttacctggtagcgtacaagccaccgtgtgcgctagggcgcaagccccccccccatcgtgggaccagatgtggaagtgtttggtccgcctcaaacccaccctccacgggccaacacccctgctatacagactgggtgctgttcaaatgaagtcaccctgacgcacccagtcaccaaatacatcatgacatgtatgtcggctga

SEQ ID NO: 503 - DNA, 4869 bp, Hepatitis C virus
tcgcccacaggacgtcaagttcccgggcggcggccagatcgttggtggagtttacttgttgccgcgcaggggccctagattgggtgtgcgcgcgacgaggaagacttccgagcggtcgcaacctcgagtagacgtcagcctatccccaaggcgcgtcggtccgagggcaggacctgggctcagcccgggtacccttggcccctctatggcaatgagggttgcggatgggcgggatggctcctgtccccccgtggtctcggcctagctggggccccacagacccccggcgtaggtcgcgcaatttgggcaaggtcatcgataccctcacgtgcggcttcgccgacctcatggggtacataccgctcgtcggcgcccctcttgggggcgctgccaggccctggcgcatggagtccgggttctggaagacggcgtgaattatgcaacagggaacctccccggttgctctttctctatcttccttctggccttgctctcttgcctgactgtgcccgcttcagcctacaagtgcgcaactccacggggctttaccatgtcaccaatgattgccctaattcgagtattgtgtacgaggcggccgatgctatcctgcacaccccggggtgtgtcccttgcgttcgtaagggtaacacctcggtgtgttggtggcggtaacccctacggtggccaccagggacggcaaactccccacaacgcagcttcgacgtcatatcgatctgctcgtcgggagtgccaccctctgttcggccctctatgtgggggacctgtgcggtctgtctttcttgttggccaactgtttaccctctctcccagacgccactggacaacgcaaggctgcaattgttccatctatcccggccatataacgggccaccgcatggcatgggatatgatgatgaactggtcccctacacggcgttggtaatggcacagctgctccggatcccacaagccatcatggacatgatcgctggtgctcactggggagtcctggcgggcatagcgtatttctctatggtggggaactgggcgaaggtcctgtagtgctgctgctatttgccggcgtcgacgcaaaaacttatgtcaccgggggagctgctgcccacaccacgtccggacttgctgggctcttcttacaaggccccaagcagaacgtccacttgatcaacaccaacggcagtggcacatcaatagtacggccttgaactgcaacgctagccttgacaccggctggatagcagggcttttctattacaacaaattcaactcttcaggttgtcccgagaggttggccagctgccgactcctactgattttgaccagggctggggccctatcagtcatgccaacggaagcggccccgaccaacgcccctactgctggcactaccccccaaaaccttgcggcattgtgcccgcgaagagtgtgtgtggcccggtatattgcttcctcccagccctgtggtggtgggaacgaccgacaggtcgggcgaacctacctacaactggggtgaaaatgatacggacgtcttcgtccttaataacatcaggccaccgctgggtaattggtttggttgacctggatgaactcaaccggattcaccaaagtgtgcggggcgcctccttgtgacatcgggggggcgggcaacaacaccttgcactgccccactgattgtttccgcaagcatccggaagccacgtactctcggtgcggctccgtccctggatcacgcccaggtgcctggtccactacccatacaggctttggcattatccctgtaccatcaactacaccatatttaaagtcaggatgtacgtgggagggatcgagcacaggttggaagcgcctgcaactggacgcggggcgagcgttgcgatctggaagacagggacaggtccgagcttagcccgttgctgctgtctaccacacagtggcaagtccttccgtgttccttcacggccatgccagccttgtccaccggcctctccacctccaccagaacattgtggatgtgcagtatttgtacggggtggggtcaagcattgcgtcctgggccattaagtgggagtacgtcgttctcctgttccttttgcttgcagacgcgcgcgtctgtcctgcttgtggatgatgttactcatatcccaagcggaggcggctttggagaaccttgtaatactcaatgcagcatccctggccgggacgcatggtcttgtatccttcctcgtgttcttctgctttgcatggtatctgaaagcaggtgggtgcccggagcggcttacgccttctacgggatgtggcctctcctcctgctcctgctggcgttgccccagcgggcatacgcgctggacacggaggtggccgcgtcgtgtggcggcgttgtcttgtcgggttaatggcgctgactttatcaccacactacaagcgctatatcagctggtgcttatggtggcttcagtattttctgaccagagcggaagcgcagctgcacgtgtgggttccccccctcaacgtccgggggggggtgacgctgtcatcttactcatgtgtgttgtacacccgactctggtattcgacatcaccaaaatgctgctggccgtctatggacccctctggattcttcaagccagtttgcttgaggtaccctacttgtgcgcgtccaaggccttctccggatctgcgcgctagcgcggaagatggtcggaggccattacgtgcaaatggccatcatcaagttaggggcgcttactggcacctatatttataatcatctcacccctcttcaggactggcgcacaacggcctgcgagacctggccgcggctgtagagccagtcgtcttctcccaaatggagaccaagctcatcacgtggggggcagacactgccgcgtgcggtgacattgtcgacggcttacccgttccgcccgtaggggccgggagatactgcttgggccggccgatggaatggtctccaaggggtggaggttgctggcgcccatcacggcgtacgcccagcagacaaggggcctcctagggtgtataatcaccagcctaactggcgggacaaaaaccaagtggaaggtgaggtccagattgtgtcgactgctgcccaaactttcctggcaacgtgcatcaatggggtatgctggactgtctaccacggggccggaacgaggaccatcgcatccccaagggtcctgttatccagatgtataccaatgtagaccaagaccttgtgggctggcccgctcctcaaggtgcccgctcattgacaccctgcacctgcggctcctcggacctttacttggtcacgaggcacgccgatgtcttcccgtgcgccggcggggtgatagcaggggcagcctgctctcgccccggcctatttcctacttgaaaggctcctcgggaggtccgctgttgtgccccgcgggacacgccgtgggcatatttagggcgcggtgtgtacccgtggagtggctaaggcggtggactttatccccgtggagagcctggaaacaaccatgaggtccccggtgtttacggacaactcctccccaccagcggtgccccagaccttccaggtggcccatttgcatctcccacaggcagcggcaagagcaccaaagtcccggctgcatatgcagctcagggttataaggtgctagtgctcaacccctctgtcgctgcaacattgggctttggtgcctacatgtctaaggcccagggatcgatcctaacatcaggaccggggtgaggacaattaccactggcagccccatcacgtactccacctacggtaagttccttgccgacggcgggtgctcagggggcgcttatgacataataatctgtgacgagtgccatccacggatgccacatccatcttgggcatcggcactgtccttgaccaagcagagaccgcgggggcgagactggttgtgctcgccaccgctacccctccgggctctatcactgtgccacatcccaacatgaggaggttgctctgtccaccaccggagagatccctttttacggcaaggccatcccccttgatgtaatcaagggggggagacatctcattttctgtcactcaaagaagaagtgtgacgagcttgccgcaaagctggtcgcatgggcgtcaatgccgtggcctactaccgcggtctcgacgtatctgtcatcccgaccggcggcgatgttgtcgtcgtggcaactgatgctctcatgaccggctttactggcgacttcgactcggtgatgactgcaacacgtgcgtcacccagacagtcgatttcagccttgaccctaccttcactattgagacaaccacgcttccccaggatgctgtctcccgcactcaacgtcggggcaggactggcagggggaggcaaggcacctacgatttgtggcaccgggggagcgcccctctggcatgttcgactcgtctgtcctctgtgagtgctatgacgcgggctgtgcttggtacgagctcacgcctgccgagaccacagttaggctacgagcgtaatgaacaccccggggcttcccgtgtgtcaagaccatcttgaattttgggagggcgtctttacaggcctcacccatatagatgcccacttcctatcccagacaaaacagagcggggagaatcttccttacctggtagcgtacaagccaccgtgtgcgctagggcgcaagccccccccccatcgtgggaccagatgtggaagtgtttggtccgcctcaaacccaccctccacgggccaacacccctgctatacagactgggtgctgttcaaatgaagtcaccctgacgcacccagtcaccaaatacatcatgacatgtatgtcggctga

SEQ ID NO: 504 - DNA, 4869 bp, Hepatitis C virus; identical to SEQ ID NO: 474

SEQ ID NO: 505 - DNA, 4869 bp, Hepatitis C virus
tcgcccacaggacgtcaagttcccgggcggcggccagatcgttggtggagtttacttgttgccgcgcaggggccctagattgggtgtgcgcgcgacgaggaagacttccgagcggtcgcaacctcgagtagacgtcagcctatccccaaggcgcgtcggtccgagggcaggacctgggctcagcccgggtacccttggcccctctatggcaatgagggttgcggatgggcgggatggctcctgtccccccgtggtctcggcctagctggggccccacagacccccggcgtaggtcgcgcaatttgggcaaggtcatcgataccctcacgtgcggcttcgccgacctcatggggtacataccgctcgtcggcgcccctcttgggggcgctgccaggccctggcgcatggagtccgggttctggaagacggcgtgaattatgcaacagggaacctccccggttgctctttctctatcttccttctggccttgctctcttgcctgactgtgcctgcttcagcctacaagtgcgcaactccacggggctttaccatgtcaccaatgattgccctaattcgagtattgtgtacgaggcggccgatgctatcctgcacaccccggggtgtgtcccttgcgttcgtaagggtaacacctcggtgtgttggtggcggtaacccctacggtggccaccagggacggcaaactccccacaacgcagcttcgacgtcatatcgatctgctcgtcgggagtgccaccctctgttcggccctctatgtgggggacctgtgcggtctgtctttcttgttggccaactgtttaccctctctcccagacgccactggacaacgcaaggctgcaattgttccatctatcccggccatataacgggccaccgcatggcatgggatatgatgatgaactggtcccctacacggcgttggtaatggcacagctgctccggatcccacaagccatcatggacatgatcgctggtgctcactggggagtcctggcgggcatagcgtatttctctatggtggggaactgggcgaaggtcctgtagtgctgctgctatttgccggcgtcgacgcaaaaacttatgtcaccgggggagctgctgcccacaccacgtccggacttgctgggctcttcttacaaggccccaagcagaacgtccacttgatcaacaccaacggcagtggcacatcaatagtacggccttgaactgcaacgctagccttgacaccggctggatagcagggcttttctattacaacaaattcaactcttcaggttgtcccgagaggttggccagctgccgactcctactgattttgaccagggctggggccctatcagtcatgccaacggaagcggccccgaccaacgcccctactgctggcactaccccccaaaaccttgcggcattgtgcccgcgaagagtgtgtgtggcccggtatattgcttcctcccagccctgtggtggtgggaacgaccgacaggtcgggcgaacctacctacaactggggtgaaaatgatacggacgtcttcgtccttaacaacatcaggccaccgctgggcaattggtttggttgacctggatgaactcaaccggattcaccaaagtgtgcggggcgcctccttgtgacatcgggggggcgggcaacaacaccttgcactgccccactgattgtttccgcaagcatccggaagccacgtactctcggtgcggctccgtccctggatcacgcccaggtgcctggtccactacccatacaggctttggcattatccctgtaccatcaactacaccatatttaaagtcaggatgtacgtgggagggatcgagcacaggttggaagcgcctgcaactggacgcggggcgagcgttgcgatctggaagacagggacaggtccgagcttagcccgttgctgctgtctaccacacagtggcaagtccttccgtgttccttcacggccatgccagccttgtccaccggcctctccacctccaccagaacattgtggatgtgcagtatttgtacggggtggggtcaagcattgcgtcctgggccattaagtgggagtacgtcgttctcctgttccttttgcttgcagacgcgcgcgtctgtcctgcttgtggatgatgttactcatatcccaagcggaggcggctttggagaaccttgtaatactcaatgcagcatccctggccgggacgcacggtcttgtatccttcctcgtgttcttctgctttgcatggtatctgaaagcaggtgggtgcccggagcggcttacgccttctacgggatgtggcctctcctcctgctcctgctggcgttgccccagcgggcatacgcgctggacacggaggtggccgcgtcgtgtggcggcgttgtcttgtcgggttaatggcgctgactttatcaccacactacaagcgctatatcagctggtgcttatggtggcttcagtattttctgaccagagcggaagcgcagctgcacgtgtgggttccccccctcaacgtccgggggggggtgacgctgtcatcttactcatgtgtgttgtacacccgactctggtattcgacatcaccaaaatgctgctggccgtctatggacccctctggattcttcaagccagtttgcttgaggtaccctacttgtgcgcgtccaaggccttctccggatctgcgcgctagcgcggaagatggtcggaggccattacgtgcaaatggccatcatcaagttaggggcgcttactggcacctatatttataatcatctcacccctcttcaggactggcgcacaacggcctgcgagacctggccgcggctgtagagccagtcgttttctcccaaatggagaccaagctcatcacgtggggggcagacactgccgcgtgcggtgacattgtcgacggcttacccgttccgcccgtaggggccgggagatactgcttgggccggccgatggaatggtctccaaggggtggaggttgctggcgcccatcacggcgtacgcccagcagacaaggggcctcctagggtgtataatcaccagcctaactggcgggacaaaaaccaagtggaaggtgaggtccagattgtgtcgactgctgcccaaactttcctggcaacgtgcatcaatggggtatgctggactgtctaccacggggccggaacgaggaccatcgcatccccaagggtcctgttatccagatgtataccaatgtagaccaagaccttgtgggctggcccgctcctcaaggtgcccgctcattgacaccctgcacctgcggctcctcggacctttacttggtcacgaggcacgccgatgtcttcccgtgcgccggcggggtgatagcaggggcagcctgctctcgccccggcctatttcctacttgaaaggctcctcgggaggtccgctgttgtgccccgcgggacacgccgtgggcatatttagggcgcggtgtgtacccgtggagtggctaaggcggtggactttatccccgtggagagcctggaaacaaccatgaggtccccggtgtttacggacaactcctccccaccagcggtgccccagaccttccaggtggcccatttgcatctcccacaggcagcggcaagagcaccaaagtcccggctgcatatgcagctcagggttataaggtgctagtgctcaacccctctgtcgctgcaacattgggctttggtgcctacatgtctaaggcccagggatcgatcctaacatcaggaccggggtgaggacaattaccactggcagccccatcacgtactccacctacggtaagttccttgccgacggcgggtgctcagggggcgcttatgacataataatctgtgacgagtgccatccacggatgccacatccatcttgggcatcggcactgtccttgaccaagcagagaccgcgggggcgagactggttgtgctcgccaccgctacccctccgggctctatcactgtgccacatcccaacatgaggaggttgctctgtccaccaccggagagatccctttttacggcaaggccatcccccttgatgtaatcaagggggggagacatctcattttctgtcactcaaagaagaagtgtgacgagcttgccgcaaagctggtcgcatgggcgtcaatgccgtggcctactaccgcggtctcgacgtatctgtcatcccgaccggcggcgatgttgtcgtcgtggcaactgatgctctcatgaccggctttactggcgacttcgactcggtgatgactgcaacacgtgcgtcacccagacagtcgatttcagccttgaccctaccttcaccattgagacaaccacgcttccccaggatgctgtctcccgcactcaacgtcggggcaggactggcagggggaggcaaggcacctacgatttgtggcaccgggggagcgcccctctggcatgttcgactcgtctgtcctctgtgagtgctatgacgcgggctgtgcttggtacgagctcacgcctgccgagaccacagttaggctacgagcgtaatgaacaccccggggcttcccgtgtgtcaagaccatcttgaattttgggagggcgtctttacaggcctcacccatatagatgcccacttcctatcccagacaaaacagagcggggagaatcttccttacctggtagcgtacaagccaccgtgtgcgctagggcgcaagccccccccccatcgtgggaccagatgtggaagtgtttggtccgcctcaaacccaccctccacgggccaacacccctgctatacagactgggtgctgttcaaatgaagtcaccctgacgcacccagtcaccaaatacatcatgacatgtatgtcggctga

SEQ ID NO: 506 - DNA, 4869 bp, Hepatitis C virus; identical to SEQ ID NO: 474

SEQ ID NO: 507 - DNA, 4869 bp, Hepatitis C virus
tcgcccacaggacgtcaagttcccgggcggcggccagatcgttggtggagtttacttgttgccgcgcaggggccctagattgggtgtgcgcgcgacgaggaagacttccgagcggtcgcaacctcgagtagacgtcagcctatccccaaggcgcgtcggtccgagggcaggacctgggctcagcccgggtacccttggcccctctatgccaatgagggttgcggatgggcgggatggctcctgtccccccgtggtctcggcctagctggggccccacagacccccggcgtaggtcgcgcaatttgggcaaggtcatcgataccctcacgtgcggcttcgccgacctcatggggtacataccgctcgtcggcgcccctcttgggggcgctgccaggccctggcgcatggagtccgggttctggaagacggcgtgaattatgcaacagggaacctccccggttgctctttctctatcttccctctggccttgctctcttgcctgactgtgcccgcttcagcctacaagtgcgcaactccacggggctttaccatgtcaccaatgattgccctaattcgagtattgtgtacgaggcggccgatgctatcctgcacaccccggggtgtgtcccttgcgttcgtaagggtaacacctcggtgtgttggtggcggtaacccctacggtggccaccagggacggcaaactccccacaacgcagcttcgacgtcatatcgatctgctcgtcgggagtgccaccctctgttcggccctctatgtgggggacctgtgcggtctgtctttcttgttggccaactgtttaccctctctcccagacgccactggacaacgcaaggctgcaattgttccatctatcccggccatataacgggccaccgcatggcatgggatatgatgatgaactggtcccctacacggcgttggtaatggcacagctgctccggatcccacaagccatcatggacatgatcgctggtgctcactggggagtcctggcgggcatagcgtatttctctatggtggggaactgggcgaaggtcctgtagtgctgctgctatttgccggcgtcgacgcaaaaacttatgtcaccgggggagctgctgcccacaccacgtctggacttgctgggctcttcttacaaggccccaagcagaacgtccacttgatcaacaccaacggcagtggcacatcaatagtacggccttgaactgcaacgctagccttgacaccggctggatagcagggcttttctattacaacaaattcaactcttcaggttgtcccgagaggttggccagctgccgactcctactgattttgaccagggctggggccctatcagtcatgccaacggaagcggccccgaccaacgcccctactgctggcactaccccccaaaaccttgcggcattgtgcccgcgaagagtgtgtgtggcccggtatattgcttcctcccagccctgtggtggtgggaacgaccgacaggtcgggcgaacctacctacaactggggtgaaaatgatacggacgtcttcgtccttaacaacattaggccaccgctgggtaattggtttggttgacctggatgaactcaaccggattcaccaaagtgtgcggggcgcctccttgtgacatcgggggggcgggcaacaacaccttgcactgccccactgattgtttccgcaagcatccggaagccacgtactctcggtgcggctccgtccctggatcacgcccaggtgcctggtccactacccatacaggctttggcattatccctgtaccatcaactacaccatatttaaagtcaggatgtacgtgggagggatcgagcacaggttggaagcgcctgcaactggacgcggggcgagcgttgcgatctggaagacagggacaggtccgagcttagcccgttgctgctgtctaccacacagtggcaagtccttccgtgttccttcacggccatgccagccttgtccaccggcctctccacctccaccagaacattgtggatgtgcagtatttgtacggggtggggtcaagcattgcgtcctgggccattaagtgggagtacgtcgttctcctgttccttttgcttgcagacgcgcgcgtctgtcctgcttgtggatgatgttactcatatcccaagcggaggcggctttggagaaccttgtaatactcaatgcagcatccctggccgggacgcacggtcttgtatccttcctcgtgttcttctgctttgcatggtatctgaaagcaggtgggtgcccggagcggcttacgccttctacgggatgtggcctctcctcctgctcctgctggcgttgccccagcgggcatacgcgctggacacggaggtggccgcgtcgtgtggcggcgttgtcttgtcgggttaatggcgctgactttatcaccacactacaagcgctatatcagctggtgcttatggtggcttcagtattttctgaccagagcggaagcgcagctgcacgtgtgggttccccccctcaacgtccgggggggggtgacgctgtcatcttactcatgtgtgttgtacacccgactctggtattcgacatcaccaaaatgctgctggccgtctatggacccctctggattcttcaagccagtttgcttgaggtaccctacttgtgcgcgtccaaggccttctccggatctgcgcgctagcgcggaagatggtcggaggccattacgtgcaaatggccatcatcaagttaggggcgcttactggcacctatatttataatcatctcacccctcttcaggactggcgcacaacggcctgcgagacctggccgcggctgtagagccagtcgttttctcccaaatggagaccaagctcatcacgtggggggcagacactgccgcgtgcggtgacattgtcgacggcttacccgttccgcccgtaggggccgggagatactgcttgggccggccgatggaatggtctccaaggggtggaggttgctggcgcccatcacggcgtacgcccagcagacaaggggcctcctagggtgtataatcaccagcctaactggcgggacaaaaaccaagtggaaggtgaggtccagattgtgtcgactgctgcccaaactttcctggcaacgtgcatcaatggggtatgctggactgtctaccacggggccggaacgaggaccatcgcatccccaagggtcctgttatccagatgtataccaatgtagaccaagaccttgtgggctggcccgctcctcaaggtgcccgctcattgacaccctgcacctgcggctcctcggacctttacttggtcacgaggcacgccgatgtcttcccgtgcgccggcggggtgatagcaggggcagcctgctctcgccccggcctatttcctacttgaaaggctcctcgggaggtccgctgttgtgccccgcgggacacgccgtgggcatatttagggcgcgatgtgtacccgtggagtggctaaggcggtggactttatccccgtggagagcctggaaacaaccatgaggtccccggtgtttacggacaactcctccccaccagcggtgccccagaccttccaggtggcccatttgcatctcccacaggcagcggcaagagcaccaaagtcccggctgcatatgcagctcagggttataaggtgctagtgctcaacccctctgtcgctgcaacattgggctttggtgcctacatgtctaaggcccagggatcgatcctaacatcaggaccggggtgaggacaattaccactggcagccccatcacgtactccacctacggtaagttccttgccgacggcgggtgctcagggggcgcttatgacataataatctgtgacgagtgccatccacggatgccacatccatcttgggcatcggcactgtccttgaccaagcagagaccgcgggggcgagactggttgtgctcgccaccgctacccctccgggctctatcactgtgccacatcccaacatgaggaggttgctctgtccaccaccggagagatccctttttacggcaaggccatcccccttgatgtaatcaagggggggagacatctcattttctgtcactcaaagaagaagtgtgacgagcttgccgcaaagctggtcgcatgggcgtcaatgccgtggcctactaccgcggtctcgacgtatctgtcatcccgaccggcggcgatgttgtcgtcgtggcaactgatgctctcatgaccggctttactggcgacttcgactcggtgatgactgcaacacgtgcgtcacccagacagtcgatttcagccttgaccctaccttcaccattgagacaaccacgcttccccaggatgctgtctcccgcactcaacgtcggggcaggactggcagggggaggcaaggcacctacgatttgtggcaccgggggagcgcccctctggcatgttcgactcgtctgtcctctgtgagtgctatgacgcgggctgtgcttggtacgagctcacgcctgccgagaccacagttaggctacgagcgtaatgaacaccccggggcttcccgtgtgtcaagaccatcttgaattttgggagggcgtctttacaggcctcacccatatagatgcccacttcctatcccagacaaaacagagcggggagaatcttccttacctggtagcgtacaagccaccgtgtgcgctagggcgcaagccccccccccatcgtgggaccagatgtggaagtgtttggtccgcctcaaacccaccctccacgggccaacacccctgctatacagactgggtgctgttcaaatgaagtcaccctgacgcacccagtcaccaaatacatcatgacatgtatgtcggctga

SEQ ID NO: 508 - DNA, 4869 bp, Hepatitis C virus
tcgcccacaggacgtcaagttcccgggcggcggccagatcgttggtggagtttacttgttgccgcgcaggggccctagattgggtgtgcgcgcgacgaggaagacttccgagcggtcgcaacctcgagtagacgtcagcctatccccaaggcgcgtcggtccgagggcaggacctgggctcagcccgggtacccttggcccctctatggcaatgagggttgcggatgggcgggatggctcctgtccccccgtggtctcggcctagctggggccccacagacccccggcgtaggtcgcgcaatttgggcaaggtcatcgataccctcacgtgcggcttcgccgacctcatggggtacataccgctcgtcggcgcccctcttgggggcgctgccaggccctggcgcatggagtccgggttctggaagacggcgtgaattatgcaacagggaacctccccggttgctctttctctatcttccttctggccttgctctcttgcctgactgtgcccgcttcagcctacaagtgcgcaactccacggggctttaccatgtcaccaatgattgccctaattcgagtattgtgtacgaggcggccgatgctatcctgcacaccccggggtgtgtcccttgcgttcgtaagggtaacacctcggtgtgttggtggcggtaacccctacggtggccaccagggacggcaaactccccacaacgcagcttcgacgtcatatcgatctgctcgtcgggagtgccaccctctgttcggccctctatgtgggggacctgtgcggtctgtctttcttgttggccaactgtttaccctctctcccagacgccactggacaacgcaaggctgcaattgttccatctatcccggccatataacgggccaccgcatggcatgggatatgatgatgaactggtcccctacacggcgttggtaatggcacagctgctccggatcccacaagccatcatggacatgatcgctggtgctcactggggagtcctggcgggcatagcgtatttctctatggtggggaactgggcgaaggtcctgtagtgctgctgctatttgccggcgtcgacgcagaaacttatgtcaccgggggagctgctggccacaccacgtccggacttgctgggctcttcttacaaggccccaagcagaacgtccacttgatcaacaccaacggcagtggcacatcaatagtacggccttgaactgcaacgctagccttgacaccggctggatagcagggcttttctattacaacaaattcaactcttcaggttgtcccgagaggttggccagctgccgactcctactgattttgaccagggctggggccctatcagtcatgccaacggaagcggccccgaccaacgcccctactgctggcactaccccccaaaaccttgcggcattgtgcccgcgaagagtgtgtgtggcccggtatattgcttcctcccagccctgtggtggtgggaacgaccgacagggcgggcgtacctacctacaactggggtgaaaatgatacggacgtcttcgtccttaacaacatcaggccaccgctgggtaattggtttggttgacctggatgaactcaactggattcaccaaagtgtgcggggcgcctccttgtgacatcgggggggcgggcaacaacaccttgcactgccccactgattgtttccgcaagcatccggaagccacgtactctcggtgcggctccgtccctggatcacgcccaggtgcctggtccactacccatacaggctttggcattatccctgtaccatcaactacaccatatttaaagtcaggatgtacgtgggagggatcgagcacaggttggaagcgcctgcaactggacgcggggcgagcgttgcgatctggaagacagggacaggtccgagcttagcccgttgctgctgtctaccacacagtggcaagtccttccgtgttccttcacggccatgccagccttgtccaccggcctctccacctccaccagaacattgtggatgtgcagtatttgtacggggtggggtcaagcattgcgtcctgggccattaagtgggagtacgtcgttctcctgttccttttgcttgcagacgcgcgcgtctgtcctgcttgtggatgatgttactcatatcccaagcggaggcggctttggagaaccttgtaatactcaatgcagcatccctggccgggacgcacggtcttgtatccttcctcgtgttcttctgctttgcatggtatctgaaagcaggtgggtgcccggagcggcttacgccttctacgggatgtggcctctcctcctgctcctgctggcgttgccccagcgggcatacgcgctggacacggaggtggccgcgtcgtgtggcggcgttgtcttgtcgggttaatggcgctgactttatcaccacactacaagcgctatatcagctggtgcttatggtggcttcagtattttctgaccagagcggaagcgcagctgcacgtgtgggttccccccctcaacgtccgggggggggtgacgctgtcatcttactcatgtgtgttgtacacccgactctggtattcgacatcaccaaaatgctgctggccgtctatggacccctctggattcttcaagccagtttgcttgaggtaccctacttgtgcgcgtccaaggccttctccggatctgcgcgctagcgcggaagatggtcggaggccattacgtgcaaatggccatcatcaagttaggggcgcttactggcacctatatttataatcatctcacccctcttcaggactggcgcacaacggcctgcgagacctggccgcggctgtagagccagtcgtcttctcccaaatggagaccaagctcatcacgtggggggcagacactgccgcgtgcggtgacattgtcgacggcttacccgttccgcccgtaggggccgggagatactgcttgggccggccgatggaatggtctccaaggggtggaggttgctggcgcccatcacggcgtacgcccagcagacaaggggcctcctagggtgtataatcaccagcctaactggcgggacaaaaaccaagtggaaggtgaggtccagattgtgtcgactgctgcccaaactttcctggcaacgtgcatcaatggggtatgctggactgtctaccacggggccggaacgaggaccatcgcatccccaagggtcctgttatccagatgtataccaatgtagaccaagaccttgtgggctggcccgctcctcaaggtgcccgctcattgacaccctgcacctgcggctcctcggacctttacttggtcacgaggcacgccgatgtcttcccgtgcgccggcggggtgatagcaggggcagcctgctctcgccccggcctatttcctacttgaaaggctcctcgggaggtccgctgttgtgccccgcgggacacgccgtgggcatatttagggcgcggtgtgtacccgtggagtggctaaggcggtggactttatccccgtggagagcctggaaacaaccatgaggtccccggtgtttacggacaactcctccccaccagcggtgccccagaccttccaggtggcccatttgcatctcccacaggcagcggcaagagcaccaaagtcccggctgcatatgcagctcagggttataaggtgctagtgctcaacccctctgtcgctgcaacattgggctttggtgcctacatgtctaaggcccagggatcgatcctaacatcaggaccggggtgaggacaattaccactggcagccccatcacgtactccacctacggtaagttccttgccgacggcgggtgctcagggggcgcttatgacataataatctgtgacgagtgccatccacggatgccacatccatcttgggcatcggcactgtccttgaccaagcagagaccgcgggggcgagactggttgtgctcgccaccgctacccctccgggctctatcactgtgccacatcccaacatgaggaggttgctctgtccaccaccggagagatccctttttacggcaaggccatcccccttgatgtaatcaagggggggagacatctcattttctgtcactcaaagaagaagtgtgacgagcttgccgcaaagctggtcgcatgggcgtcaatgccgtggcctactaccgcggtctcgacgtatctgtcatcccgaccggcggcgatgttgtcgtcgtggcaactgatgctctcatgaccggctttactggcgacttcgactcggtgatgactgcaacacgtgcgtcacccagacagtcgatttcagccttgaccctaccttcaccattgagacaaccacgcttccccaggatgctgtctcccgcactcaacgtcggggcaggactggcagggggaggcaaggcacctacgatttgtggcaccgggggagcgcccctctggcatgttcgactcgtctgtcctctgtgagtgctatgacgcgggctgtgcttggtacgagctcacgcctgccgagaccacagttaggctacgagcgtaatgaacaccccggggcttcccgtgtgtcaagaccatcttgaattttgggagggcgtctttacaggcctcacccatatagatgcccacttcctatcccagacaaaacagagcggggagaatcttccttacctggtagcgtacaagccaccgtgtgcgctagggcgcaagccccccccccatcgtgggaccagatgtggaagtgtttggtccgcctcaaacccaccctccacgggccaacacccctgctatacagactgggtgctgttcaaatgaagtcaccctgacgcacccagtcaccaaatacatcatgacatgtatgtcggctga

SEQ ID NO: 509 - DNA, 4869 bp, Hepatitis C virus
tcgcccacaggacgtcaagttcccgggcggcggccagatcgttggtggagtttacttgttgccgcgcaggggccctagattgggtgtgcgcgcgacgaggaagacttccgagcggtcgcaacctcgagtagacgtcagcctatccccaaggcgcgtcggtccgagggcaggacctgggctcagcccgggtacccttggcccctctatggcaatgagggttgcggatgggcgggatggctcctgtccccccgtggtctcggcctagctggggccccacagacccccggcgtaggtcgcgcaatttgggcaaggtcatcgataccctcacgtgcggcttcgccgacctcatggggtacataccgctcgtcggcgcccctcttgggggcgctgccaggccctggcgcatggagtccgggttctggaagacggcgtgaattatgcaacagggaacctccccggttgctctttctctatcttccttctggccttgctctcttgcctgactgtgcccgcttcagcctacaagtgcgcaactccacggggctttaccatgtcaccaatgattgccctaattcgagtattgtgtacgaggcggccgatgctatcctgcacaccccggggtgtgtcccttgcgttcgtaagggtaacacctcggtgtgttggtggcggtaacccctacggtggccaccagggacggcaaactccccacaacgcagcttcgacgtcatatcgatctgctcgtcgggagtgccaccctctgttcggccctctatgtgggggacctgtgcggtctgtctttcttgttggccaactgtttaccctctctcccagacgccactggacaacgcaaggctgcaattgttccatctatcccggccatataacgggccaccgcatggcatgggatatgatgatgaactggtcccctacacggcgttggtaatggcacagctgctccggatcccacaagccatcatggacatgatcgctggtgctcactggggagtcctggcgggcatagcgtatttctctatggtggggaactgggcgaaggtcctgtagtgctgctgctatttgccggcgtcgacgcaaaaacttatgtcaccgggggagctgctgcccacaccgcgtccggacttgctgggctcttcttacaaggccccaagcagaacgtccacttgatcaacaccaacggcagtggcacatcaatagtacggccttgaactgcaacgctagccttgacaccggctggatagcagggcttttctattacaacaaattcaactcttcaggttgtcccgagaggttggccagctgccgactcctactgattttgaccagggctggggccctatcagtcatgccaacggaagcggccccgaccaacgcccctactgctggcactaccccccaaaaccttgcggcattgtgcccgcgaagagtgtgtgtggcccggtatactgcttcctcccagccctgtggtggtgggaacgaccgacaggtcgggcgaacctacctacaactggggtgaaaatgatacggacgtcttcgtccttaacaacatcaggccaccgctgggtaattggtttggttgacctggatgaactcaactggattcaccaaagtgtgcggggcgcctccttgtgacatcgggggggcgggcaacaacaccttgcactgccccactgattgtttccgcaagcatccggaagccacgtactctcggtgcggctccgtccctggatcacgcccaggtgcctggtccactacccatacaggctttggcattatccctgtaccatcaactacaccatatttaaagtcaggatgtacgtgggagggatcgagcacaggttggaagcgcctgcaactggacgcggggcgagcgttgcgatctggaagacagggacaggtccgagcttagcccgttgctgctgtctaccacacagtggcaagtccttccgtgttccttcacggccatgccagccttgtccaccggcctctccacctccaccagaacattgtggatgtgcagtatttgtacggggtggggtcaagcattgcgtcctgggccattaagtgggagtacgtcgttctcctgttccttttgcttgcagacgcgcgcgtctgtcctgcttgtggatgatgttactcatatcccaagcggaggcggctttggagaaccttgtaatactcaatgcagcatccctggccgggacgcacggtcttgtatccttcctcgtgttcttctgctttgcatggtatctgaaagcaggtgggtgcccggagcggcttacgccttctacgggatgtggcctctcctcctgctcctgctggcgttgccccagcgggcatacgcgctggacacggaggtggccgcgtcgtgtggcggcgttgtcttgtcgggttaatggcgctgactttatcaccacactacaagcgctatatcagctggtgcttatggtggcttcagtattttctgaccagagcggaagcgcagctgcacgtgtgggttccccccctcaacgtccgggggggggtgacgctgtcatcttactcatgtgtgttgtacacccgactctggtattcgacatcaccaaaatgctgctggccgtctatggacccctctggattcttcaagccagtttgcttgaggtaccctacttgtgcgcgtccaaggccttctccggatctgcgcgctagcgcggaagatggtcggaggccattacgtgcaaatggccatcatcaagttaggggcgcttactggcacctatatttataatcatctcacccctcttcaggactggcgcacaacggcctgcgagacctggccgcggctgtagagccagtcgtcttctcccaaatggagaccaagctcatcacgtggggggcagacactgccgcgtgcggtgacattgtcgacggcttacccgttccgcccgtaggggccgggagatactgcttgggccggccgatggaatggtctccaaggggtggaggttgctggcgcccatcacggcgtacgcccagcagacaaggggcctcctagggtgtataatcaccagcctaactggcgggacaaaaaccaagtggaaggtgaggtccagattgtgtcgactgctgcccaaactttcctggcaacgtgcatcaatggggtatgctggactgtctaccacggggccggaacgaggaccatcgcatccccaagggtcctgttatccagatgtataccaatgtagaccaagaccttgtgggctggcccgctcctcaaggtgcccgctcattgacaccctgcacctgcggctcctcggacctttacttggtcacgaggcacgccgatgtcttcccgtgcgccggcggggtgatagcaggggcagcctgctctcgccccggcctatttcctacttgaaaggctcctcgggaggtccgctgttgtgccccgcgggacacgccgtgggcatatttagggcgcggtgtgtacccgtggagtggctaaggcggtggactttatccccgtggagagcctggaaacaaccatgaggtccccggtgtttacggacaactcctccccaccagcggtgccccagaccttccaggtggcccatttgcatctcccacaggcagcggcaagagcaccaaagtcccggctgcatatgcagctcagggttataaggtgctagtgctcaacccctctgtcgctgcaacattgggctttggtgcctacatgtctaaggcccagggatcgatcctaacatcaggaccggggtgaggacaattaccactggcagccccatcacgtactccacctacggtaagttccttgccgacggcgggtgctcagggggcgcttatgacataataatctgtgacgagtgccatccacggatgccacatccatcttgggcatcggcactgtccttgaccaagcagagaccgcgggggcgagactggttgtgctcgccaccgctacccctccgggctctatcactgtgccacatcccaacatgaggaggttgctctgtccaccaccggagagatccctttttacggcaaggccatcccccttgatgtaatcaagggggggagacatctcattttctgtcactcaaagaagaagtgtgacgagcttgccgcaaagctggtcgcatgggcgtcaatgccgtggcctactaccgcggtctcgacgtatctgtcatcccgaccggcggcgatgttgtcgtcgtggcaactgatgctctcatgaccggctttactggcgacttcgactcggtgatgactgcaacacgtgcgtcacccagacagtcgatttcagccttgaccctaccttcaccattgagacgaccacgcttccccaggatgctgtctcccgcactcaacgtcggggcaggactggcagggggaggcaaggcacctacgatttgtggcaccgggggagcgcccctctggcatgttcgactcgtctgtcctctgtgagtgctatgacgcgggctgtgcttggtacgagctcacgcctgccgagaccacagttaggctacgagcgtaatgaacaccccggggcttcctgtgtgtcaagaccatcttgaattttgggagggcgtctttacaggcctcacccatatagatgcccacttcctatcccagacaaaacagagcggggagaatcttccttacctggtagcgtacaagccaccgtgtgcgctagggcgcaagccccccccccatcgtgggaccagatgtggaagtgtttggtccgcctcaaacccaccctccacgggccaacacccctgctatacagactgggtgctgttcaaatgaagtcaccctgacgcacccagtcaccaaatacatcatgacatgtatgtcggctga

SEQ ID NO: 510 - DNA, 4869 bp, Hepatitis C virus
tcgcccacaggacgtcaagttcccgggcggcggccagatcgttggtggagtttacttgttgccgcgcaggggccctagattgggtgtgcgcgcgacgaggaaggcttccgagcggtcgcaacctcgagtagacgtcagcctatccccaaggcgcgtcggtccgagggcaggacctgggctcagcccgggtacccttggcccctctatggcaatgagggttgcggatgggcgggatggctcctgtccccccgtggtctcggcctagctggggccccacagacccccggcgtaggtcgcgcaatttgggcaaggtcatcgataccctcacgtgcggcttcgccgacctcatggggtacataccgctcgtcggcgcccctcttgggggcgctgccaggccctggcgcatggagtccgggttctggaagacggcgtgaattatgcaacagggaacctccccggttgctctttctctatcttccttctggccttgctctcttgcctgactgtgcccgcttcagcctacaagtgcgcaactccacggggctttaccatgtcaccaatgattgccctaattcgagtattgtgtacgaggcggccgatgctatcctgcacaccccggggtgtgtcccttgcgttcgtaagggtaacacctcggtgtgttggtggcggtaacccctacggtggccaccagggacggcaaactccccacaacgcagcttcgacgtcatatcgatctgctcgtcgggagtgccaccctctgttcggccctctatgtgggggacctgtgcggtctgtctttcttgttggccaactgtttaccctctctcccagacgccactggacaacgcaaggctgcaattgttccatctatcccggccatataacgggccaccgcatggcatgggatatgatgatgaactggtcccctacacggcgttggtaatggcacagctgctccggatcccacaagccatcatggacatgatcgctggtgctcactggggagtcctggcgggcatagcgtatttctctatggtggggaactgggcgaaggtcctgtagtgctgctgctatttgccggcgtcgacgcaaaaacttatgtcaccgggggagctgctgcccacaccacgtccggacttgctgggctcttcttacaaggccccaagcagaacgtccacttgatcaacaccaacggcagtggcacatcaatagtacggccttgaactgcaacgctagccttgacaccggctggatagcagggcttttctattacaacaaattcaactcttcaggttgtcccgagaggttggccagctgccgactcctactgattttgaccagggctggggccctatcagtcatgccaacggaagcggccccgaccaacgcccctactgctggcactaccccccaaaaccttgcggcattgtgcccgcgaagagtgtgtgtggcccggtatattgcttcctcccagccctgtggtggtgggaacgaccgacaggtcgggcgaacctacctacaactggggtgaaaatgatacggacgtcttcgtccttaacaacatcaggccaccgctgggtaattggtttggttgacctggatgaactcaaccggattcaccaaagtgtgcggggcgcctccttgtgacatcgggggggcgggcaacaacaccttgcactgccccactgattgtttccgcaagcatccggaagccacgtactctcggtgcggctccgtccctggatcacgcccaggtgcctggtccactacccatacaggctttggcattatccctgtaccatcaactacaccatatttaaagtcaggatgtacgtgggagggatcgagcacaggttggaagcgcctgcaactggacgcggggcgagcgttgcgatctggaagacagggacaggtccgagcttagcccgttgctgctgtctaccacacagtggcaagtccttccgtgttccttcacggccatgccagccttgtccaccggcctctccacctccaccagaacattgtggatgtgcagtatttgtacggggtggggtcaagcattgcgtcctgggccattaagtgggagtacgtcgttctcctgttccttttgcttgcagacgcgcgcgtctgtcctgcttgtggatgatgttactcatatcccaagcggaggcggctttggagaaccttgtaatactcaatgcagcatccctggccgggacgcacggtcttgtatccttcctcgtgttcttctgctttgcatggtatctgaaagcaggtgggtgcccggagcggcttacgccttctacgggatgtggcctctcctcctgctcctgctggcgttgccccagcgggcatacgcgctggacacggaggtggccgcgtcgtgtggcggcgttgtcttgtcgggttaatggcgctgactttatcaccacactacaagcgctatatcagctggtgcttatggtggcttcagtattttctgaccagagcggaagcgcagctgcacgtgtgggttccccccctcaacgtccgggggggcgtgacgctgtcatcttactcatgtgtgttgtacacccgactctggtattcgacatcaccaaaatgctgctggccgtctatggacccctctggattcttcaagccagtttgcttgaggtaccctacttgtgcgcgtccaaggccttctccggatctgcgcgctagcgcggaagatggtcggaggccattacgtgcaaatggccatcatcaagttaggggcgcttactggcacctatatttataatcatctcacccctcttcaggactggcgcacaacggcctgcgagacctggccgcggctgtagagccagtcgttttctcccaaatggagaccaagctcattacgtggggggcagacactgccgcgtgcggtgacattgtcgacggcttacccgttccgcccgtaggggccgggagatactgcttgggccggccgatggaatggtctccaaggggtggaggttgctggcgcccatcacggcgtacgcccagcagacaaggggcctcctagggtgtataatcaccagcctaactggcgggacaaaaaccaagtggaaggtgaggtccagattgtgtcgactgctgcccaaactttcctggcaacgtgcatcaatggggtatgctggactgtctaccacggggccggaacgaggaccatcgcatccccaagggtcctgttatccagatgtataccaatgtagaccaagaccttgtgggctggcccgctcctcaaggtgcccgctcattgacaccctgcacctgcggctcctcggacctttacttggtcacgaggcacgccgatgtcttcccgtgcgccggcggggtgatagcaggggcagcctgctctcgccccggcctatttcctacttgaaaggctcctcgggaggtccgctgttgtgccccgcgggacacgccgtgggcatatttagggcgcggtgtgtacccgtggagtggctaaggcggtggactttatccccgtggagagcctggaaacaaccatgaggtccccggtgtttacggacaactcctccccaccagcggtgccccagaccttccaggtggcccatttgcatctcccacaggcagcggcaagagcaccaaagtcccggctgcatatgcagctcagggttataaggtgctagtgctcaacccctctgtcgctgcaacattgggctttggtgcctacatgtctaaggcccagggatcgatcctaacatcaggaccggggtgaggacaattaccactggcagccccatcacgtactccacctacggtaagttccttgccgacggcgggtgctcagggggcgcttatgacataataatctgtgacgagtgccatccacggatgccacatccatcttgggcatcggcactgtccttgaccaagcagagaccgcgggggcgagactggttgtgctcgccaccgctacccctccgggctctatcactgtgccacatcccaacatgaggaggttgctctgtccaccaccggagagatccctttttacggcaaggccatcccccttgatgtaatcaagggggggagacatctcattttctgtcactcaaagaagaagtgtgacgagcttgccgcaaagctggtcgcatgggcgtcaatgccgtggcctactaccgcggtctcgacgtatctgtcatcccgaccggcggcgatgttgtcgtcgtggcaactgatgctctcatgaccggctttactggcgacttcgactcggtgatgactgcaacacgtgcgtcacccagacagtcgatttcagccttgaccctaccttcaccattgagacaaccacgcttccccaggatgctgtctcccgcactcaacgtcggggcaggactggcagggggaggcaaggcacctacgatttgtggcaccgggggagcgcccctctggcatgttcgactcgtctgtcctctgtgagtgctatgacgcgggctgtgcttggtacgagctcacgcctgccgagaccacagttaggctacgagcgtaatgaacaccccggggcttcccgtgtgtcaagaccatcttgaattttgggagggcgtctttacaggcctcacccatatagatgcccacttcctatcccagacaaaacagagcggggagaatcttccttacctggtagcgtacaagccaccgtgtgcgctagggcgcaagccccccccccatcgtgggaccagatgtggaagtgtttggtccgcctcaaacccaccctccacgggccaacacccctgctatacagactgggtgctgttcaaatgaagtcaccctgacgcacccagtcaccaaatacatcatgacatgtatgtcggctga

SEQ ID NO: 511 - DNA, 270 bp, Hepatitis C virus
tcgcccacaggacgtcaagttcccgggcggcggccagatcgttggtggagtttacttgttgccgcgcaggggccctagattgggtgtgcgcgcgacgaggaagacttccgagcggtcgcaacctcgagtagacgtcagcctatccccaaggcgcgtcggtccgagggcaggacctgggctcagcccgggtacccttggcccctctatggcaatgagggttgcggatgggcgggatggctcctgtccccccgtggtctcggcctagctggg

SEQ ID NO: 512 - DNA, 4869 bp, Hepatitis C virus
tcgcccacaggacgtcaagttcccgggcggcggccagatcgttggtggagtttacttgttgccgcgcaggggccctagattgggtgtgcgcgcgacgaggaagacttccgagcggtcgcaacctcgagtagacgtcagcctatccccaaggcgcgtcggtccgagggcaggacctgggctcagcccgggtacccttggcccctctatggcaatgagggttgcggatgggcgggatggctcctgtccccccgtggtctcggcctagctggggccccacagacccccggcgtaggtcgcgcaatttgggcaaggtcatcgataccctcacgtgcggcttcgccgacctcatggggtacataccgctcgtcggcgcccctcttgggggcgctgccaggccctggcgcatggagtccgggttctggaagacggcgtgaattatgcaacagggaacctccccggttgctctttctctatcttccttctggccttgctctcttgcctgactgtgcccgcttcagcctacaagtgcgcaactccacggggctttaccatgtcaccaatgattgccctaattcgagtattgtgtacgaggcggccgatgttatcctgcacaccccggggtgtgtcccttgcgttcgtaagggtaacacctcggtgtgttggtggcggtaacccctacggtggccaccagggacggcaaactccccacaacgcagcttcgacgtcatatcgatctgctcgtcgggagtgccaccctctgttcggccctctatgtgggggacctgtgcggtctgtctttcttgttggccaactgtttaccctctctcccagacgccactggacaacgcaaggctgcaattgttccatctatcccggccatataacgggccaccgcatggcatgggatatgatgatgaactggtcccctacacggcgttggtaatggcacagctgctccggatcccacaagccatcatggacatgatcgctggtgctcactggggagtcctggcgggcatagcgtatttctctatggtggggaactgggcgaaggtcctgtagtgctgctgctatttgccggcgtcgacgcaaaaacttatgtcaccgggggagctgctgcccacaccacgtccggacttgctgggctcttcttacaaggccccaagcagaacgtccacttgatcaacaccaacggcagtggcacatcaatagtacggccttgaactgcaacgctagccttgacaccggctggatagcagggcttttctattataacaaattcaactcttcaggttgtcccgagaggttggccagctgccgactcctactgattttgaccagggctggggccctatcagtcatgccaacggaagcggccccgaccaacgcccctactgctggcactaccccccaaaaccttgcggcattgtgcccgcgaagagtgtgtgtggcccggtatattgcttcctcccagccctgtggtggtgggaacgaccgacgggtcgggcgtacctacctacaactggggtgaaaatgatacggacgtcttcgtccttaacaacatcaggccaccgctgggtaattggtttggttgacctggatgaactcaactggattcaccaaagtgtgcggggcgcctccttgtgacatcgggggggcgggcaacaacaccttgcactgccccactgattgtttccgcaagcatccggaagccacgtactctcggtgcggctccgtccctggatcacgcccaggtgcctggtccactacccatacaggctttggcattatccctgtaccatcaactacaccatatttaaagtcaggatgtacgtgggagggatcgagcacaggttggaagcgcctgcaactggacgcggggcgagcgttgcgatctggaagacagggacaggtccgagcttagcccgttgctgctgtctaccacacagtggcaagtccttccgtgttccttcacggccatgccagccttgtccaccggcctctccacccccaccagaacattgtggatgtgcagtatttgtacggggtggggtcaagcattgcgtcctgggccattaagtgggagtacgtcgttctcctgttccttttgcttgcagacgcgcgcgtctgtcctgcttgtggatgatgttactcatatcccaagcggaggcggctttggagaaccttgtaatactcaatgcagcatccctggccgggacgcacggtcttgtatccttcctcgtgttcttctgctttgcatggtatctgaaagcaggtgggtgcccggagcggcttacgccttctacgggatgtggcctctcctcctgctcctgctggcgttgccccagcgggcatacgcgctggacacggaggtggccgcgtcgtgtggcggcgttgtcttgtcgggttaatggcgctgactttatcaccacactacaagcgctatatcagctggtgcttatggtggcttcagtattttctgaccagagcggaagcgcagctgcacgtgtgggttccccccctcaacgtccgggggggggtgacgctgtcatcttactcatgtgtgttgtacacccgactctggtattcgacatcaccaaaatgctgctggccgtctatggacccctctggattcttcaagccagtttgcttgaggtaccctacttgtgcgcgtccaaggccttctccggatctgcgcgctagcgcggaagatggtcggaggccattacgtgcaaatggccatcatcaagttaggggcgcttactggcacctatatttataatcatctcacccctcttcaggactggcgcacaacggcctgcgagacctggccgcggctgtagagccagtcgtcttctcccaaatggagaccaagctcatcacgtggggggcagacactgccgcgtgcggtgacattgtcgacggcttacccgttccgcccgtaggggccgggagatactgcttgggccggccgatggaatggtctccaaggggtggaggttgctggcgcccatcacggcgtacgcccagcagacaaggggcctcctagggtgtataatcaccagcctaactggcgggacaaaaaccaagtggaaggtgaggtccagattgtgtcgactgctgcccaaactttcctggcaacgtgcatcaatggggtatgctggactgtctaccacggggccggaacgaggaccatcgcatccccaagggtcctgttatccagatgtataccaatgtagaccaagaccttgtgggctggcccgctcctcaaggtgcccgctcattgacaccctgcacctgcggctcctcggacctttacttggtcacgaggcacgccgatgtcttcccgtgcgccggcggggtgatagcaggggcagcctgctctcgccccggcctatttcctacttgaaaggctcctcgggaggtccgctgttgtgccccgcgggacacgccgtgggcatatttagggcgcggtgtgtacccgtggagtggctaaggcggtggactttatccccgtggagagcctggaaacaaccatgaggtccccggtgtttacggacaactcctccccaccagcggtgccccagaccttccaggtggcccatttgcatctcccacaggcagcggcaagagcaccaaagtcccggctgcatatgcagctcagggttataaggtgctagtgctcaacccctctgtcgctgcaacattgggctttggtgcctacatgtctaaggcccagggatcgatcctaacatcaggaccggggtgaggacaattaccactggcagccccatcacgtactccacctacggtaagttccttgccgacggcgggtgctcagggggcgcttatgacataataatctgtgacgagtgccatccacggatgccacatccatcttgggcatcggcactgtccttgaccaagcagagaccgcgggggcgagactggttgtgctcgccaccgctacccctccgggctctatcactgtgccacatcccaacatgaggaggttgctctgtccaccaccggagagatccctttttacggcaaggccatcccccttgatgtaatcaagggggggagacatctcattttctgtcactcaaagaagaagtgtgacgagcttgccgcaaagctggtcgcatgggcgtcaatgccgtggcctactaccgcggtctcgacgtatctgtcatcccgaccggcggcgatgttgtcgtcgtggcaactgatgctctcatgaccggctttactggcgacttcgactcggtgatgactgcaacacgtgcgtcacccagacagtcgatttcagccttgaccctaccttcaccattgagacaaccacgcttccccaggatgctgtctcccgcactcaacgtcggggcaggactggcagggggaggcaaggcacctacgatttgtggcaccgggggagcgcccctctggcatgttcgactcgtctgtcctctgtgagtgctatgacgcgggctgtgcttggtacgagctcacgcctgccgagaccacagttaggctacgagcgtaatgaacaccccggggcttcccgtgtgtcaagaccatcttgaattttgggagggcgtctttacaggcctcacccatatagatgcccacttcctatcccagacaaaacagagcggggagaatcttccttacctggtagcgtacaagccaccgtgtgcgctagggcgcaagccccccccccatcgtgggaccagatgtggaagtgtttggtccgcctcaaacccaccctccacgggccaacacccctgctatacagactgggtgctgttcaaatgaagtcaccctgacgcacccagtcaccaaatacatcatgacatgtatgtcggctga

SEQ ID NO: 513 - DNA, 4869 bp, Hepatitis C virus
tcgcccacaggacgtcaagttcccgggcggcggccagatcgttggtggagtttacttgttgccgcgcaggggccctagattgggtgtgcgcgcgacgaggaagacttccgagcggtcgcaacctcgagtagacgtcagcctatccccaaggcgcgtcggtccgagggcaggacctgggctcagcccgggtacccttggcccctctatggcaatgagggttgcggatgggcgggatggctcctgtccccccgtggtctcggcctagctggggccccacagacccccggcgtaggtcgcgcaatttgggcaaggtcatcgataccctcacgtgcggcttcgccgacctcatggggtacataccgctcgtcggcgcccctcttgggggcgctgccaggccctggcgcatggagtccgggttctggaagacggcgtgaattatgcaacagggaacctccccggttgctctttctctatcttccttctggccttgctctcttgcctgactgtgcccgcttcagcctacaagtgcgcaactccacggggctttaccatgtcaccaatgattgccctaattcgagtattgtgtacgaggcggccgatgctatcctgcacaccccggggtgtgtcccttgcgttcgtaagggtaacacctcggtgtgttggtggcggtaacccctacggtggccaccagggacggcaaactccccacaacgcagcttcgacgtcatatcgatctgctcgtcgggagtgccaccctctgttcggccctctatgtgggggacctgtgcggtctgtctttcttgttggccaactgtttaccctctctcccagacgccactggacaacgcaaggctgcaattgttccatctatcccggccatataacgggccaccgcatggcatgggatatgatgatgaactggtcccctacacggcgttggtaatggcacagctgctccggatcccacaagccatcatggacatgatcgctggtgctcactggggagtcctggcgggcatagcgtatttctctatggtggggaactgggcgaaggtcctgtagtgctgctgctatttgccggcgtcgacgcaaaaacttatgtcaccgggggagctgctgcccacaccacgtccggacttgctgggctcttcttacaaggccccaagcagaacgtccacttgatcaacaccaacggcagtggcacatcaatagtacggccttgaactgcaacgctagccttgacaccggctggatagcagggcttttctattacaacaaattcaactcttcaggttgtcccgagaggttggccagctgccgactcctactgattttgaccagggctggggccctatcagtcatgccaacggaagcggccccgaccaacgcccctactgctggcactaccccccaaaaccttgcggcattgtgcccgcgaagagtgtgtgtggcccggtatattgcttcctcccagccctgtggtggtgggaacgaccgacaggtcgggcgaacctacctacaactggggtgaaaatgatacggacgtcttcgtccttaacaacatcaggccaccgctgggtaattggtttggttgacctggatgaactcaaccggattcaccaaagtgtgcggggcgcctccttgtgacatcgggggggcgggcaacaacaccttgcactgccccactgattgtttccgcaagcatccggaagccacgtactctcggtgcggctccgtccctggatcacgcccaggtgcctggtccactacccatacaggctttggcattatccctgtaccatcaactacaccatatttaaagtcaggatgtacgtgggagggatcgagcacaggttggaagcgcctgcaactggacgcggggcgagcgttgcgatctggaagacagggacaggtccgagcttagcccgttgctgctgtctaccacacagtggcaagtccttccgtgttccttcacggccatgccagccttgtccaccggcctctccacctccaccagaacattgtggatgtgcagtatttgtacggggtggggtcaagcattgcgtcctgggccattaagtgggagtacgtcgttctcctgttccttttgcttgcagacgcgcgcgtctgtcctgcttgtggatgatgttactcatatcccaagcggaggcggctttggagaaccttgtaatactcaatgcagcatccctggccgggacgcacggtcttgtatccttcctcgtgttcttctgctttgcatggtatctgaaagcaggtgggtgcccggagcggcttacgccttctacgggatgtggcctctcctcctgctcctgctggcgttgccccagcgggcatacgcgctggacacggaggtggccgcgtcgtgtggcggcgttgtcttgtcgggttaatggcgctgactttatcaccacactacaagcgctatatcagctggtgcttatggtggcttcagtattttctgaccagagcggaagcgcagctgcacgtgtgggttccccccctcaacgtccgggggggggtgacgctgtcatcttactcatgtgtgttgtacacccgactctggtattcgacatcaccaaaatgctgctggccgtctatggacccctctggattcttcaagccagtttgcttgaggtaccctacttgtgcgcgtccaaggccttctccggatctgcgcgctagcgcggaagatggtcggaggccattacgtgcaaatggccatcatcaagttaggggcgcttactggcacctatatttataatcatctcacccctcttcaggactggcgcacaacggcctgcgagacctggccgcggctgtagagccagtcgtcttctcccaaatggagaccaagctcatcacgtggggggcagatactgccgcgtgcggtgacattgtcgacggcttacccgttccgcccgtaggggccgggagatactgcttgggccggccgatggaatggtctccaaggggtggaggttgctggcgcccatcacggcgtacgcccagcagacaaggggcctcctagggtgtataatcaccagcctaactggcgggacaaaaaccaagtggaaggtgaggtccagattgtgtcgactgctgcccaaactttcctggcaacgtgcatcaatggggtatgctggactgtctaccacggggccggaacgaggaccatcgcatccccaagggtcctgttatccagatgtataccaatgtagaccaagaccttgtgggctggcccgctcctcaaggtgcccgctcattgacaccctgcacctgcggctcctcggacctttacttggtcacgaggcacgccgatgtcttcccgtgcgccggcggggtgatagcaggggcagcctgctctcgccccggcctatttcctacttgaaaggctcctcgggaggtccgctgttgtgccccgcgggacacgccgtgggcatatttagggcgcggtgtgtacccgtggagtggctaaggcggtggactttatccccgtggagagcctggaaacaaccatgaggtccccggtgtttacggacaactcctccccaccagcggtgccccagaccttccaggtggcccatttgcatctcccacaggcagcggcaagagcaccaaagtcccggctgcatatgcagctcagggttataaggtgctagtgctcaacccctctgtcgctgcaacattgggctttggtgcctacatgtctaaggcccagggatcgatcctaacatcaggaccggggtgaggacaattaccactggcagccccatcacgtactccacctacggtaagttccttgccgacggcgggtgctcagggggcgcttatgacataataatctgtgacgagtgccatccacggatgccacatccatcttgggcatcggcactgtccttgaccaagcagagaccgcgggggcgagactggttgtgctcgccaccgctacccctccgggctctatcactgtgccacatcccaacatgaggaggttgctctgtccaccaccggagagatccctttttacggcaaggccatcccccttgatgtaatcaagggggggagacatctcattttctgtcactcaaagaagaagtgtgacgagcttgccgcaaagctggtcgcatgggcgtcaatgccgtggcctactaccgcggtctcgacgtatctgtcatcccgaccggcggcgatgttgtcgtcgtggcaactgatgctctcatgaccggctttactggcgacttcgactcggtgatgactgcaacacgtgcgtcacccagacagtcgatttcagccttgaccctaccttcaccattgagacaaccacgcttccccaggatgctgtctcccgcactcaacgtcggggcaggactggcagggggaggcaaggcacctacgatttgtggcaccgggggagcgcccctctggcatgttcgactcgtctgtcctctgtgagtgctatgacgcgggctgtgcttggtacgagctcacgcctgccgagaccacagttaggctacgagcgtaatgaacaccccggggcttcccgtgtgtcaagaccatcttgaattttgggagggcgtctttacaggcctcacccatatagatgcccacttcctatcccagacaaaacagagcggggagaatcttccttacctggtagcgtacaagccaccgtgtgcgctagggcgcaagccccccccccatcgtgggaccagatgtggaagtgtttggtccgcctcaaacccaccctccacgggccaacacccctgctatacagactgggtgctgttcaaatgaagtcaccctgacgcacccagtcaccaaatacatcatgacatgtatgtcggctga

SEQ ID NO: 514 - DNA, 4869 bp, Hepatitis C virus
tcgcccacaggacgtcaagttcccgggcggcggccagatcgttggtggagtttacttgttgccgcgcaggggccctagattgggtgtgcgcgcgacgaggaagacttccgagcggtcgcaacctcgagtagacgtcagcctatccccaaggcgcgtcggtccgagggcaggacctgggctcagcccgggtacccttggcccctctatggcaatgagggttgcggatgggcgggatggctcctgtccccccgtggtctcggcctagctggggccccacagacccccggcgtaggtcgcgcaatttgggcaaggtcatcgataccctcacgtgcggcttcgccgacctcatggggtacataccgctcgtcggcgcccctcttgggggcgctgccaggccctggcgcatggagtccgggttctggaagacggcgtgaattatgcaacagggaacctccccggttgctctttctctatcttccttctggccttgctctcttgcctgactgtgcccgcttcagcctacaagtgcgcaactccacggggctttaccatgtcaccaatgattgccctaattcgagtattgtgtacgaggcggccgatgctatcctgcacaccccggggtgtgtcccttgcgttcgtaagggtaacacctcggtgtgttggtggcggtaacccctacggtggccaccagggacggcaaactccccacaacgcagcttcgacgtcatatcgatctgctcgtcgggagtgccaccctctgttcggccctctatgtgggggacctgtgcggtctgtctttcttgttggccaactgtttaccctctctcccagacgccactggacaacgcaaggctgcaattgttccatctatcccggccatataacgggccaccgcatggcatgggatatgatgatgaactggtcccctacacggcgttggtaatggcacagctgctccggatcccacaagccatcatggacatgatcgctggtgctcactggggagtcctggcgggcatagcgtatttctctatggtggggaactgggcgaaggtcctgtagtgctgctgctatttgccggcgtcgacgcaaaaacttatgtcaccgggggagctgctgcccacaccacgtccggacttgctgggctcttcttacaaggccccaagcagaacgtccacttgatcaacaccaacggcagtggcacatcaatagtacggccttgaactgcaacgctagccttgacaccggctggatagcagggcttttctattacaacaaattcaactcttcaggttgtcccgagaggttggccagctgccgactcctactgattttgaccagggctggggccctatcagtcatgccaacggaagcggccccgaccaacgcccctactgctggcactaccccccaaaaccttgcggcattgtgcccgcgaagagtgtgtgtggcccggtatattgcttcctcccagccctgtggtggtgggaacgaccgacaggtcgggcgaacctacctacaactggggtgaaaatgatacggacgtcttcgtccttaacaacatcaggccaccgctgggtaattggtttggttgacctggatgaactcaaccggattcaccaaagtgtgcggggcgcctccttgtgacatcgggggggcgggcaacaacaccttgcactgccccactgattgtttccgcaagcatccggaagccacgtactctcggtgcggctccgtccctggatcacgcccaggtgcctggtccactacccatacaggctttggcattatccctgtaccatcaactacaccatatttaaagtcaggatgtacgtgggagggatcgagcacaggttggaagcgcctgcaactggacgcggggcgagcgttgcgatctggaagacagggacaggtccgagcttagcccgttgctgctgtctaccacacagtggcaagtccttccgtgttccttcacggccatgccagccttgtccaccggcctctccacctccaccagaacattgtggatgtgcagtatttgtacggggtggggtcaagcattgcgtcctgggccattaagtgggagtacgtcgttctcctgttccttttgcttgcagacgcgcgcgtctgtcctgcttgtggatgatgttactcatatcccaagcggaggcggctttggagaaccttgtaatactcaatgcagcatccctggccgggacgcacggtcttgtatccttcctcgtgttcttctgctttgcatggtatctgaaagcaggtgggtgcccggagcggcttacgccttctacgggatgtggcctctcctcctgctcctgctggcgttgccccagcgggcatacgcgctggacacggaggtggccgcgtcgtgtggcggcgttgtcttgtcgggttaatggcgctgactttatcaccacactacaagcgctatatcagctggtgcttatggtggcttcagtattttctgaccagagcggaagcgcagctgcacgtgtgggttccccccctcaacgtccgggggggggtgacgctgtcatcttactcatgtgtgttgtacacccgactctggtattcgacatcaccaaaatgctgctggccgtctatggacccctctggattcttcaagccagtttgcttgaggtaccctacttgtgcgcgtccaaggccttctccggatctgcgcgctagcgcggaagatggtcggaggccattacgtgcaaatggccatcatcaagttaggggcgcttactggcacctatatttataatcatctcacccctcttcaggactggcgcacaacggcctgcgagacctggccgcggctgtagagccagtcgttttctcccaaatggagaccaagctcatcacgtggggggcagacactgccgcgtgcggtgacattgtcgacggcttacccgttccgcccgtaggggccgggagatactgcttgggccggccgatggaatggtctccaaggggtggaggttgctggcgcccatcacggcgtacgcccagcagacaaggggcctcctagggtgtataatcaccagcctaactggcgggacaaaaaccaagtggaaggtgaggtccagattgtgtcgactgctgcccaaactttcctggcaacgtgcatcaatggggtatgctggactgtctaccacggggccggaacgaggaccatcgcatccccaagggtcctgttatccagatgtataccaatgtagaccaagaccttgtgggctggcccgctcctcaaggtgcccgctcattgacaccctgcacctgcggctcctcggacctttacttggtcacgaggcacgccgatgtcttcccgtgcgccggcggggtgatagcaggggcagcctgctctcgccccggcctatttcctacttgaaaggctcctcgggaggtccgctgttgtgccccgcgggacacgccgtgggcatatttagggcgcggtgtgtacccgtggagtggctaaggcggtggactttatccccgtggagagcctggaaacaaccgtgaggtccccggtgtttacggacaactcctccccaccagcggtgccccagaccttccaggtggcccatttgcatctcccacaggcagcggcaagagcaccaaagtcccggctgcatatgcagctcagggttataaggtgctagtgctcaacccctctgtcgctgcaacattgggctttggtgcctacatgtctaaggcccagggatcgatcctaacatcaggaccggggtgaggacaattaccactggcagccccatcacgtactccacctacggtaagttccttgccgacggcgggtgctcagggggcgcttatgacataataatctgtgacgagtgccatccacggatgccacatccatcttgggcatcggcactgtccttgaccaagcagagaccgcgggggcgagactggttgtgctcgccaccgctacccctccgggctctatcactgtgccacatcccaacatgaggaggttgctctgtccaccaccggagagatccctttttacggcaaggccatcccccttgatgtaatcaagggggggagacatctcattttctgtcactcaaagaagaagtgtgacgagcttgccgcaaagctggtcgcatgggcgtcaatgccgtggcctactaccgcggtctcgacgtatctgtcatcccgaccggcggcgatgttgtcgtcgtggcaactgatgctctcatgaccggctttactggcgacttcgactcggtgatgactgcaacacgtgcgtcacccagacagtcgatttcagccttgaccctaccttcaccattgagacaaccacgcttccccaggatgctgtctcccgcactcaacgtcggggcaggactggcagggggaggcaaggcacctacgatttgtggcaccgggggagcgcccctctggcatgttcgactcgtctgtcctctgtgagtgctatgacgcgggctgtgcttggtacgagctcacgcctgccgagaccacagttaggctacgagcgtaatgaacaccccggggcttcccgtgtgtcaagaccatcttgaattttgggagggcgtctttacaggcctcacccatatagatgcccacttcctatcccagacaaaacagagcggggagaatcttccttacctggtagcgtacaagccaccgtgtgcgctagggcgcaagccccccccccatcgtgggaccagatgtggaagtgtttggtccgcctcaaacccaccctccacgggccaacacccctgctatacagactgggtgctgttcaaatgaagtcaccctgacgcacccagtcaccaaatacatcatgacatgtatgtcggctga

SEQ ID NO: 515 - DNA, 4869 bp, Hepatitis C virus
tcgcccacaggacgtcaagttcccgggcggcggccagatcgttggtggagtttacttgttgccgcgcaggggccctagattgggtgtgcgcgcgacgaggaagacttccgagcggtcgcaacctcgagtagacgtcagcctatccccaaggcgcgtcggtccgagggcaggacctgggctcagcccgggtacccttggcccctctatggcaatgagggttgcggatgggcgggatggctcctgtccccccgtggtctcggcctagctggggccccacagacccccggcgtaggtcgcgcaatttgggcaaggtcatcgataccctcacgtgcggcttcgccgacctcatggggtacataccgctcgtcggcgcccctcttgggggcgctgccaggccctggcgcatggagtccgggttctggaagacggcgtgaattatgcaacagggaacctccccggttgctctttctctatcttccttctggccttgctctcttgcctgactgtgcccgcttcagcctacaagtgcgcaactccacggggctttaccatgtcaccaatgattgccctaattcgagtattgtgtacgaggcggccgatgctatcctgcacaccccggggtgtgtcccttgcgttcgtaagggtaacacctcggtgtgttggtggcggtaacccctacggtggccaccagggacggcaaactccccacaacgcagcttcgacgtcatatcgatctgctcgtcgggagtgccaccctctgttcggccctctatgtgggggacctgtgcggtctgtctttcttgttggccaactgtttaccctctctcccagacgccactggacaacgcaaggctgcaattgttccatctatcccggccatataacgggccaccgcatggcatgggatatgatgatgaactggtcccctacacggcgttggtaatggcacagctgctccggatcccacaagccatcatggacatgatcgctggtgctcactggggagtcctggcgggcatagcgtatttctctatggtggggaactgggcgaaggtcctgtagtgctgctgctatttgccggcgtcgacgcaaaaacttatgtcaccgggggagctgctgcccacaccacgtccggacttgctgggctcttcttacaaggccccaagcagaacgtccacttgatcaacaccaacggcagtggcacatcaatagtacggccttgaactgcaacgctagccttgacaccggctggatagcagggcttttctattacaacaaattcaactcttcaggttgtcccgagaggttggccagctgccgactcctactgattttgaccagggctggggccctatcagtcatgccaacggaagcggccccgaccaacgcccctactgctggcactaccccccaaaaccttgcggcattgtgcccgcgaagagtgtgtgtggcccggtatattgcttcctcccagccctgtggtggtgggaacgaccgacaggtcgggcgaacctacctacaactggggtgaaaatgatacggacgtcttcgtccttaacaacatcaggccaccgctgggtaattggtttggttgacctggatgaactcaaccggattcaccaaagtgtgcggggcgcctccttgtgacatcgggggggcgggcaacaacaccttgcactgccccactgattgtttccgcaagcatccggaagccacgtactctcggtgcggctccgtccctggatcacgcccaggtgcctggtccactacccatacaggctttggcattatccctgtaccatcaactacaccatatttaaagtcaggatgtacgtgggagggatcgagcacaggttggaagcgcctgcaactggacgcggggcgagcgttgcgatctggaagacagggacaggtccgagcttagcccgttgctgctgtctaccacacagtggcaagtccttccgtgttccttcacggccatgccagccttgtccaccggcctctccacctccaccagaacattgtggatgtgcagtatttgtacggggtggggtcaagcattgcgtcctgggccattaagtgggagtacgtcgttctcctgttccttttgcttgcagacgcgcgcgtccgtcctgcttgtggatgatgttactcatatcccaagcggaggcggctttggagaaccttgtaatactcaatgcagcatccctggccgggacgcacggtcttgtatccttcctcgtgttcttctgctttgcatggtatctgaaagcaggtgggtgcccggagcggcttacgccttctacgggatgtggcctctcctcctgctcctgctggcgttgccccagcgggcatacgcgctggacacggaggtggccgcgtcgtgtggcggcgttgtcttgtcgggttaatggcgctgactttatcaccacactacaagcgctatatcagctggtgcttatggtggcttcagtattttctgaccagagcggaagcgcagctgcacgtgtgggttccccccctcaacgtccgggggggggtgacgctgtcatcttactcatgtgtgttgtacacccgactctggtattcgacatcaccaaaatgctgctggccgtctatggacccctctggattcttcaagccagtttgcttgaggtaccctacttgtgcgcgtccaaggccttctccggatctgcgcgctagcgcggaagatggtcggaggccattacgtgcaaatggccatcatcaagttaggggcgcttactggcacctatatttataatcatctcacccctcttcaggactggcgcacaacggcctgcgagacctggccgcggctgtagagccagtcgtcttctcccaaatggagaccaagctcatcacgtggggggcagacactgccgcgtgcggtgacattgtcgacggcttacccgttccgcccgtaggggccgggagatactgcttgggccggccgatggaatggtctccaaggggtggaggttgctggcgcccatcacggcgtacgcccagcagacaaggggcctcctagggtgtataatcaccagcctaactggcgggacaaaaaccaagtggaaggtgaggtccagattgtgtcgactgctgcccaaactttcctggcaacgtgcatcaatggggtatgctggactgtctaccacggggccggaacgaggaccatcgcatccccaagggtcctgttatccagatgtataccaatgtagaccaagaccttgtgggctggcccgctcctcaaggtgcccgctcattgacaccctgcacctgcggctcctcggacctttacttggtcacgaggcacgccgatgtcttcccgtgcgccggcggggtgatagcaggggcagcctgctctcgccccggcctatttcctacttgaaaggctcctcgggaggtccgctgttgtgccccgcgggacacgccgtgggcatatttagggcgcggtgtgtacccgtggagtggctaaggcggtggactttatccccgtggagagcctggaaacaaccatgaggtccccggtgtttacggacaactcctccccaccagcggtgccccagaccttccaggtggcccatttgcatctcccacaggcagcggcaagagcaccaaagtcccggctgcatatgcagctcagggttataaggtgctagtgctcaacccctctgtcgctgcaacattgggctttggtgcctacatgtctaaggcccagggatcgatcctaacatcaggaccggggtgaggacaattaccactggcagccccatcacgtactccacctacggtaagttccttgccgacggcgggtgctcagggggcgcttatgacataataatctgtgacgagtgccatccacggatgccacatccatcttgggcatcggcactgtccttgaccaagcagagaccgcgggggcgagactggttgtgctcgccaccgctacccctccgggctctatcactgtgccacatcccaacatgaggaggttgctctgtccaccaccggagagatccctttttacggcaaggccatcccccttgatgtaatcaagggggggagacatctcattttctgtcactcaaagaagaagtgtgacgagcttgccgcaaagctggtcgcatgggcgtcaatgccgtggcctactaccgcggtctcgacgtatctgtcatcccgaccggcggcgatgttgtcgtcgtggcaactgatgctctcatgaccggctttactggcgacttcgactcggtgatgactgcaacacgtgcgtcacccagacagtcgatttcagccttgaccctaccttcaccattgagacaaccacgcttccccaggatgctgtctcccgcactcaacgtcggggcaggactggcagggggaggcaaggcacctacgatttgtggcaccgggggagcgcccctctggcatgttcgactcgtctgtcctctgtgagtgctatgacgcgggctgtgcttggtacgagctcacgcctgccgagaccacagttaggctacgagcgtaatgaacaccccggggcttcccgtgtgtcaagaccatcttgaattttgggagggcgtctttacaggcctcacccatatagatgcccacttcctatcccagacaaaacagagcggggagaatcttccttacctggtagcgtacaagccaccgtgtgcgctagggcgcaagccccccccccatcgtgggaccagatgtggaagtgtttggtccgcctcaaacccaccctccacgggccaacacccctgctatacagactgggtgctgttcaaatgaagtcaccctgacgcacccagtcaccaaatacatcatgacatgtatgtcggctga

SEQ ID NO: 516 - DNA, 4869 bp, Hepatitis C virus
tcgcccacaggacgtcaagttcccgggcggcggccagatcgttggtggagtttacttgttgccgcgcaggggccctagattgggtgtgcgcgcgacgaggaagacttccgagcggtcgcaacctcgagtagacgtcagcctatccccaaggcgcgtcggtccgagggcaggacctgggctcagcccgggtacccttggcccctctatggcaatgagggttgcggatgggcgggatggctcctgtccccccgtggtctcggcctagctggggccccacagacccccggcgtaggtcgcgcaatttgggcaaggtcatcgataccctcacgtgcggcttcgccgacctcatggggtacataccgctcgtcggcgcccctcttgggggcgctgccaggccctggcgcatggagtccgggttctggaagacggcgtgaattatgcaacagggaacctccccggttgctctttctctatcttccttctggccttgctctcttgcctgactgtgcccgcttcagcctacaagtgcgcaactccacggggctttaccatgtcaccaatgattgccctaattcgagtattgtgtacgaggcggccgatgctatcctgcacaccccggggtgtgtcccttgcgttcgtaagggtaacacctcggtgtgttggtggcggtaacccctacggtggccaccagggacggcaaactccccacaacgcagcttcgacgtcatatcgatctgctcgtcgggagtgccaccctctgttcggccctctatgtgggggacctgtgcggtctgtctttcttgttggccaactgtttaccctctctcccagacgccactggacaacgcaaggctgcaattgttccatctatcccggccatataacgggccaccgcatggcatgggatatgatgatgaactggtcccctacacggcgttggtaatggcacagctgctccggatcccacaagccatcatggacatgatcgctggtgctcactggggagtcctggcgggcatagcgtatttctctatggtggggaactgggcgaaggtcctgtagtgctgctgctatttgccggcgtcgacgcaaaaacttatgtcaccgggggagctgctgcccacaccacgtccggacttgctgggctcttcttacaaggccccaagcagaacgtccacttgatcaacaccaacggcagtggcacatcaatagtacggccttgaactgcaacgctagccttgacaccggctggatagcagggcttttctattacaacaaattcaactcttcaggttgtcccgagaggttggccagctgccgactcctactgattttgaccagggctggggccctatcagtcatgccaacggaagcggccccgaccaacgcccctactgctggcactaccccccaaaaccttgcggcattgtgcccgcgaagagtgtgtgtggcccggtatattgcttcctcccagccctgtggtggtgggaacgaccgacaggtcgggcgaacctacctacaactggggtgaaaatgatacggacgtcttcgtccttaacaacatcaggccaccgctgggtaattggtttggttgacctggatgaactcaaccggattcaccaaagtgtgcggggcgcctccttgtgacatcgggggggcgggcaacaacaccttgcactgccccactgattgtttccgcaagcatccggaagccacgtactctcggtgcggctccgtccctggatcacgcccaggtgcctggtccactacccatacaggctttggcattatccctgtaccatcaactacaccatatttaaagtcaggatgtacgtgggagggatcgagcacaggttggaagcgcctgcaactggacgcggggcgagcgttgcgatctggaagacagggacaggtccgagcttagcccgttgctgctgtctaccacacagtggcaagtccttccgtgttccttcacggccatgccagccttgtccaccggcctctccacctccaccagaacattgtggatgtgcagtatttgtacggggtggggtcaagcattgcgtcctgggccattaagtgggagtacgtcgttctcctgttccttttgcttgcagacgcgcgcgtctgtcctgcttgtggatgatgttactcatatcccaagcggaggcggctttggagaaccttgtaatactcaatgcagcatccctggccgggacgcacggtcttgtatccttcctcgtgttcttctgctttgcatggtatctgaaagcaggtgggtgcccggagcggcttacgccttctacgggatgtggcctctcctcctgctcctgctggcgttgccccagcgggcatacgcgctggacacggaggtggccgcgtcgtgtggcggcgttgtcttgtcgggttaatggcgctgactttatcaccacactacaagcgctatatcagctggtgcttatggtggcttcagtattttctgaccagagcggaagcgcagctgcacgtgtgggttccccccctcaacgtccgggggggggtgacgctgtcatcttactcatgtgtgttgtacacccgactctggtattcgacatcaccaaaatgctgctggccgtctatggacccctctggattcttcaagccagtttgcttgaggtaccctacttgtgcgcgtccaaggccttctccggatctgcgcgctagcgcggaagatggtcggaggccattacgtgcaaatggccatcatcaagttaggggcgcttactggcacctatatttataatcatctcacccctcttcaggactggcgcacaacggcctgcgagacctggccgcggctgtagagccagtcgtcttctcccaaatggagaccaagctcatcacgtggggggcagacactgccgcgtgcggtgacattgtcgacggcttacccgttccgcccgtaggggccgggagatactgcttgggccggccgatggaatggtctccaaggggtggaggttgctggcgcccatcacggcgtacgcccagcagacaaggggcctcctagggtgtataatcaccagcctaactggcgggacaaaaaccaagtggaaggtgaggtccagattgtgtcgactgctgcccaaactttcctggcaacgtgcatcaatggggtatgctggactgtctaccacggggccggaacgaggaccatcgcatccccaagggtcctgttatccagatgtataccaatgtagaccaagaccttgtgggctggcccgctcctcaaggtgcccgctcattgacaccctgcacctgcggctcctcggacctttacttggtcacgaggcacgccgatgtcttcccgtgcgccggcggggtgatagcaggggcagcctgctctcgccccggcctatttcctacttgaaaggctcctcgggaggtccgctgttgtgccccgcgggacacgccgtgggcatatttagggcgcggtgtgtacccgtggagtggctaaggcggtggactttatccccgtggagagcctggaaacaaccataaggtccccggtgtttacggacaactcctccccaccagcggtgccccagaccttccaggtggcccatttgcatctcccacaggcagcggcaagagcaccaaagtcccggctgcatatgcagctcagggttataaggtgctagtgctcaacccctctgtcgctgcaacattgggctttggtgcctacatgtctaaggcccagggatcgatcctaacatcaggaccggggtgaggacaattaccactggcagccccatcacgtactccacctacggtaagttccttgccgacggcgggtgctcagggggcgcttatgacataataatctgtgacgagtgccatccacggatgccacatccatcttgggcatcggcactgtccttgaccaagcagagaccgcgggggcgagactggttgtgctcgccaccgctacccctccgggctctatcactgtgccacatcccaacatgaggaggttgctctgtccaccaccggagagatccctttttacggcaaggccatcccccttgatgtaatcaagggggggagacatctcattttctgtcactcaaagaagaagtgtgacgagcttgccgcaaagctggtcgcatgggcgtcaatgccgtggcctactaccgcggtctcgacgtatctgtcatcccgaccggcggcgatgttgtcgtcgtggcaactgatgctctcatgaccggctttactggcgacttcgactcggtgatgactgcaacacgtgcgtcacccagacagtcgatttcagccttgaccctaccttcaccattgagacaaccacgcttccccaggatgctgtctcccgcactcaacgtcggggcaggactggcagggggaggcaaggcacctacgatttgtggcaccgggggagcgcccctctggcatgttcgactcgtctgtcctctgtgagtgctatgacgcgggctgtgcttggtacgagctcacgcctgccgagaccacagttaggctacgagcgtaatgaacaccccggggcttcccgtgtgtcaagaccatcttgaattttgggagggcgtctttacaggcctcacccatatagatgcccacttcctatcccagacaaaacagagcggggagaatcttccttacctggtagcgtacaagccaccgtgtgcgctagggcgcaagccccccccccatcgtgggaccagatgtggaagtgtttggtccgcctcaaacccaccctccacgggccaacacccctgctatacagactgggtgctgttcaaatgaagtcaccctgacgcacccagtcaccaaatacatcatgacatgtatgtcggctga

SEQ ID NO: 517 - DNA, 4869 bp, Hepatitis C virus
tcgcccacaggacgtcaagttcccgggcggcggccagatcgttggtggagtttacttgttgccgcgcaggggccctagattgggtgtgcgcgcgacgaggaagacttccgagcggtcgcaacctcgagtagacgtcagcctatccccaaggcgcgtcggtccgagggcaggacctgggctcagcccgggtacccttggcccctctatggcaatgagggttgcggatgggcgggatggctcctgtccccccgtggtctcggcctagctggggccccacagacccccggcgtaggtcgcgcaatttgggcaaggtcatcgataccctcacgtgcggcttcgccgacctcatggggtacataccgctcgtcggcgcccctcttgggggcgctgccaggccctggcgcatggagtccgggttctggaagacggcgtgaattatgcaacagggaacctccccggttgctctttctctatcttccttctggccttgctctcttgcctgactgtgcccgcttcagcctacaagtgcgcaactccacggggctttaccatgtcaccaatgattgccctaattcgagtattgtgtacgaggcggccgatgctatcctgcacaccccggggtgtgttccttgcgttcgtaagggtaacacctcggtgtgttggtggcggtaacccctacggtggccaccagggacggcaaactccccacaacgcagcttcgacgtcatatcgatctgctcgtcgggagtgccaccctctgttcggccctctatgtgggggacctgtgcggtctgtctttcttgttggccaactgtttaccctctctcccagacgccactggacaacgcaaggctgcaattgttccatctatcccggccatataacgggccaccgcatggcatgggatatgatgatgaactggtcccctacacggcgttggtaatggcacagctgctccggatcccacaagccatcatggacatgatcgctggtgctcactggggagtcctggcgggcatagcgtatttctctatggtggggaactgggcgaaggtcctgtagtgctgctgctatttgccggcgtcgacgcaaaaacttatgtcaccgggggagctgctgcccacaccacgtccggacttgctgggctcttcttacaaggccccaagcagaacgtccacttgatcaacaccaacggcagtggcacatcaatagtacggccttgaactgcaacgctagccttgacaccggctggatagcagggcttttctattacaacaaattcaactcttcaggttgtcccgagaggttggccagctgccgactcctactgattttgaccagggctggggccctatcagtcatgccaacggaagcggccccgaccaacgcccctactgctggcactaccccccaaaaccttgcggcattgtgcccgcgaagagtgtgtgtggcccggtatattgcttcctcccagccctgtggtggtgggaacgaccgacaggtcgggcgaacctacctacaactggggtgaaaatgatacggacgtcttcgtccttaacaacatcaggccaccgctgggtaattggtttggttgacctggatgaactcaactggattcaccaaagtgtgcggggcgcctccttgtgacatcgggggggcgggcaacaacaccttgcactgccccactgattgtttccgcaagcatccggaagccacgtactctcggtgcggctccgtccctggatcacgcccaggtgcctggtccactacccatacaggctttggcattatccctgtaccatcaactacaccatatttaaagtcaggatgtacgtgggagggatcgagcacaggttggaagcgcctgcaactggacgcggggcgagcgttgcgatctggaagacagggacaggtccgagcttagcccgttgctgctgtctaccacacagtggcaagtccttccgtgttccttcacggccatgccagccttgtccaccggcctctccacctccaccagaacattgtggatgtgcagtatttgtacggggtggggtcaagcattgcgtcctgggccattaagtgggagtacgtcgttctcctgttccttttgcttgcagacgcgcgcgtctgtcctgcttgtggatgatgttactcatatcccaagcggaggccgctttggagaaccttgtaatactcaatgcagcatccctggccgggacgcacggtcttgtatccttcctcgtgttcttctgctttgcatggtatctgaaagcaggtgggtgcccggagcggcttacgccttctacgggatgtggcctctcctcctgctcctgctggcgttgccccagcgggcatacgcgctggacacggaggtggccgcgtcgtgtggcggcgttgtcttgtcgggttaatggcgctgactttatcaccacactacaagcgctatatcagctggtgcttatggtggcttcagtattttctgaccagggcggaagcgcagctgcacgtgtgggttccccccctcaacgtccgggggggggtgacgctgtcatcttactcatgtgtgttgtacacccgactctggtattcgacatcaccaaaatgctgctggccgtctatggacccctctggattcttcaagccagtttgcttgaggtaccctacttgtgcgcgtccaaggccttctccggatctgcgcgctagcgcggaagatggtcggaggccattacgtgcaaatggccatcatcaagttaggggcgcttactggcacctatatttataatcatctcacccctcttcaggactggcgcacaacggcctgcgagacctggccgcggctgtagagccagtcgtcttctcccaaatggagaccaagctcatcacgtggggggcagacactgccgcgtgcggtgacattgtcgacggcttacccgttccgcccgtaggggccgggagatactgcttgggccggccgatggaatggtctccaaggggtggaggttgctggcgcccatcacggcgtacgcccagcagacaaggggcctcctagggtgtataatcaccagcctaactggcgggacaaaaaccaagtggaaggtgaggtccagattgtgtcgactgctgcccaaactttcctggcaacgtgcatcaatggggtatgctggactgtctaccacggggccggaacgaggaccatcgcatccccaagggtcctgttatccagatgtataccaatgtagaccaagaccttgtgggctggcccgctcctcaaggtgcccgctcattgacaccctgcacctgcggctcctcggacctttacttggtcacgaggcacgccgatgtcttcccgtgcgccggcggggtgatagcaggggcagcctgctctcgccccggcctatttcctacttgaaaggctcctcgggaggtccgctgttgtgccccgcgggacacgccgtgggcatatttagggcgcggtgtgtacccgtggagtggctaaggcggtggactttatccccgtggagagcctggaaacaaccatgaggtccccggtgtttacggacaactcctccccaccagcggtgccccagaccttccaggtggcccatttgcatctcccacaggcagcggcaagagcaccaaagtcccggctgcatatgcagctcagggttataaggtgctagtgctcaacccctctgtcgctgcaacattgggctttggtgcctacatgtctaaggcccagggatcgatcctaacatcaggaccggggtgaggacaattaccactggcagccccatcacgtactccacctacggtaagttccttgccgacggcgggtgctcagggggcgcttatgacataataatctgtgacgagtgccatccacggatgccacatccatcttgggcatcggcactgtccttgaccaagcagagaccgcgggggcgagactggttgtgctcgccaccgctacccctccgggctctatcactgtgccacatcccaacatgaggaggttgctctgtccaccaccggagagatccctttttacggcaaggccatcccccttgatgtaatcaagggggggagacatctcattttctgtcactcaaagaagaagtgtgacgagcttgccgcaaagctggtcgcatgggcgtcaatgccgtggcctactaccgcggtctcgacgtatctgtcatcccgaccggcggcgatgttgtcgtcgtggcaactgatgctctcatgaccggctttactggcgacttcgactcggtgatgactgcaacacgtgcgtcacccagacagtcgatttcagccttgaccctaccttcaccattgagacaaccacgcttccccaggatgctgtctcccgcactcaacgtcggggcaggactggcagggggaggcaaggcacctacgatttgtggcaccgggggagcgcccctctggcatgttcgactcgtctgtcctctgtgagtgctatgacgcgggctgtgcttggtacgagctcacgcctgccgagaccacagttaggctacgagcgtaatgaacaccccggggcttcccgtgtgtcaagaccatcttgaattttgggagggcgtctttacaggcctcacccatatagatgcccacttcctatcccagacaaaacagagcggggagaatcttccttacctggtagcgtacaagccaccgtgtgcgctagggcgcaagccccccccccatcgtgggaccagatgtggaagtgtttggtccgcctcaaacccaccctccacgggccaacacccctgctatacagactgggtgctgttcaaatgaagtcaccctgacgcacccagtcaccaaatacatcatgacatgtatgtcggctga

SEQ ID NO: 518 - DNA, 4869 bp, Hepatitis C virus
tcgcccacaggacgtcaagttcccgggcggcggccagatcgttggtggagtttacttgttgccgcgcaggggccctagattgggtgtgcgcgcgacgaggaagacttccgagcggtcgcaacctcgagtagacgtcagcctatccccaaggcgcgtcggtccgagggcaggacctgggctcagcccgggtacccttggcccctctatggcaatgagggttgcggatgggcgggatggctcctgtccccccgtggtctcggcctagctggggccccacagacccccggcgtaggtcgcgcaatttgggcaaggtcatcgataccctcacgtgcggcttcgccgacctcatggggtacataccgctcgtcggcgcccctcttgggggcgctgccaggccctggcgcatggagtccgggttctggaagacggcgtgaattatgcaacagggaacctccccggttgctctttctctatcttccttctggccttgctctcttgcctgactgtgcccgcttcagcctacaagtgcgcaactccacggggctttaccatgtcaccaatgattgccctaattcgagtattgtgtacgaggcggccgatgctatcctgcacaccccggggtgtgtcccttgcgttcgtaagggtaacacctcggtgtgttggtggcggtaacccctacggtggccaccagggacggcaaactccccacaacgcagcttcgacgtcatatcgatctgctcgtcgggagtgccaccctctgttcggccctctatgtgggggacctgtgcggtctgtctttcttgttggccaactgtttaccctctctcccagacgccactggacaacgcaaggctgcaattgttccatctatcccggccatataacgggccaccgcatggcatgggatatgatgatgaactggtcccctacacggcgttggtaatggcacagctgctccggatcccacaagccatcatggacatgatcgctggtgctcactggggagtcctggcgggcgtagcgtatttctctatggtggggaactgggcgaaggtcctgtagtgctgctgctatttgccggcgtcgacgcaaaaacttatgtcaccgggggagctgctgcccacaccacgtccggacttgctgggctcttcttacaaggccccaagcagaacgtccacttgatcaacaccaacggcagtggcacatcaatagtacggccttgaactgcaacgctagccttgacaccggctggatagcagggcttttctattacaacaaattcaactcttcaggttgtcccgagaggttggccagctgccgactcctactgattttgaccagggctggggccctatcagtcatgccaacggaagcggccccgaccaacgcccctactgctggcactaccccccaaaaccttgcggcattgtgcccgcgaagagtgtgtgtggcccggtatattgcttcctcccagccctgtggtggtgggaacgaccgacaggtcgggcgaacctacctacaactggggtgaaaatgatacggacgtcttcgtccttaacaacatcaggccaccgctgggtaattggtttggttgacctggatgaactcaaccggattcaccaaagtgtgcggggcgcctccttgtgacatcgggggggcgggcaacaacaccttgcactgccccactgattgtttccgcaagcatccggaagccacgtactctcggtgcggctccgtccctggatcacgcccaggtgcctggtccactacccatacaggctttggcattatccctgtaccatcaactacaccatatttaaagtcaggatgtacgtgggagggatcgagcacaggttggaagcgcctgcaactggacgcggggcgagcgttgcgatctggaagacagggacaggtccgagcttagcccgttgctgctgtctaccacacagtggcaagtccttccgtgttccttcacggccatgccagccttgtccaccggcctctccacctccaccagaacattgtggatgtgcagtatttgtacggggtggggtcaagcattgcgtcctgggccattaagtgggagtacgtcgttctcctgttccttttgcttgcagacgcgcgcgtctgtcctgcttgtggatgatgttactcatatcccaagcggaggcggctttggagaaccttgtaatactcaatgcagcatccctggccgggacgcacggtcttgtatccttcctcgtgttcttctgctttgcatggtatctgaaagcaggtgggtgcccggagcggcttacgccttctacgggatgtggcctctcctcctgctcctgctggcgttgccccagcgggcatacgcgctggacacggaggtggccgcgtcgtgtggcggcgttgtcttgtcgggttaatggcgctgactttatcaccacactacaagcgctatatcagctggtgcttatggtggcttcagtattttctgaccagagcggaagcgcagctgcacgtgtgggttccccccctcaacgtccgggggggggtgacgctgtcatcttactcatgtgtgttgtacacccgactctggtattcgacatcaccaaaatgctgctggccgtctatggacccctctggattcttcaagccagtttgcttgaggtaccctacttgtgcgcgtccaaggccttctccggatctgcgcgctagcgcggaagatggtcggaggccattacgtgcaaatggccatcatcaagttaggggcgcttactggcacctatatttataatcatctcacccctcttcaggactggcgcacaacggcctgcgagacctggccgcggctgtagagccagtcgttttctcccaaatggagaccaagctcatcacgtggggggcagacactgccgcgtgcggtgacattgtcgacggcttacccgttccgcccgtaggggccgggagatactgcttgggccggccgatggaatggtctccaaggggtggaggttgctggcgcccatcacggcgtacgcccagcagacaaggggcctcctagggtgtataatcaccagcctaactggcgggacaaaaaccaagtggaaggtgaggtccagattgtgtcgactgctgcccaaactttcctggcaacgtgcatcaatggggtatgctggactgtctaccacggggccggaacgaggaccatcgcatccccaagggtcctgttatccagatgtataccaatgtagaccaagaccttgtgggctggcccgctcctcaaggtgcccgctcattgacaccctgcacctgcggctcctcggacctttacttggtcacgaggcacgccgatgtcttcccgtgcgccggcggggtgatagcaggggcagcctgctctcgccccggcctatttcctacttgaaaggctcctcgggaggtccgctgttgtgccccgcgggacacgccgtgggcatatttagggcgcggtgtgtacccgtggagtggctaaggcggtggactttatccccgtggagagcctggaaacaaccatgaggtccccggtgtttacggacaactcctccccaccagcggtgccccagaccttccaggtggcccatttgcatctcccacaggcagcggcaagagcaccaaagtcccggctgcatatgcagctcagggttataaggtgctagtgctcaacccctctgtcgctgcaacattgggctttggtgcctacatgtctaaggcccagggatcgatcctaacatcaggaccggggtgaggacaattaccactggcagccccatcacgtactccacctacggtaagttccttgccgacggcgggtgctcagggggcgcttatgacataataatctgtgacgagtgccatccacggatgccacatccatcttgggcatcggcactgtccttgaccaagcagagaccgcgggggcgagactggttgtgctcgccaccgctacccctccgggctctatcactgtgccacatcccaacatgaggaggttgctctgtccaccaccggagagatccctttttacggcaaggccatcccccttgatgtaatcaagggggggagacatctcattttctgtcactcaaagaagaagtgtgacgagcttgccgcaaagctggtcgcatgggcgtcaatgccgtggcctactaccgcggtctcgacgtatctgtcatcccgaccggcggcgatgttgtcgtcgtggcaactgatgctctcatgaccggctttactggcgacttcgactcggtgatgactgcaacacgtgcgtcacccagacagtcgatttcagccttgaccctaccttcaccattgagacaaccacgcttccccaggatgctgtctcccgcactcaacgtcggggcaggactggcagggggaggcaaggcacctacgatttgtggcaccgggggagcgcccctctggcatgttcgactcgtctgtcctctgtgagtgctatgacgcgggctgtgcttggtacgagctcacgcctgccgagaccacagttaggctacgagcgtaatgaacaccccggggcttcccgtgtgtcaagaccatcttgaattttgggagggcgtctttacaggcctcacccatatagatgcccacttcctatcccagacaaaacagagcggggagaatcttccttacctggtagcgtacaagccaccgtgtgcgctagggcgcaagccccccccccatcgtgggaccagatgtggaagtgtttggtccgcctcaaacccaccctccacgggccaacacccctgctatacagactgggtgctgttcaaatgaagtcaccctgacgcacccagtcaccaaatacatcatgacatgtatgtcggctga

SEQ ID NO: 519 - DNA, 4869 bp, Hepatitis C virus
tcgcccacaggacgtcaagttcccgggcggcggccagatcgttggtggagtttacttgttgccgcgcaggggccctagattgggtgtgcgcgcgacgaggaagacttccgagcggtcgcaacctcgagtagacgtcagcctatccccaaggcgcgtcggttcgagggcaggacctgggctcagcccgggtacccttggcccctctatggcaatgagggttgcggatgggcgggatggctcctgtccccccgtggtctcggcctagctggggccccacagacccccggcgtaggtcgcgcaatttgggcaaggtcatcgataccctcacgtgcggcttcgccgacctcatggggtacataccgctcgtcggcgcccctcttgggggcgctgccaggccctggcgcatggagtccgggttctggaagacggcgtgaattatgcaacagggaacctccccggttgctctttctctatcttccttctggccttgctctcttgcctgactgtgcccgcttcagcctacaagtgcgcaactccacggggctttaccatgtcaccaatgattgccctaattcgagtattgtgtacgaggcggccgatgctatcctgcacaccccggggtgtgtcccttgcgttcgtaagggtaacacctcggtgtgttggtggcggtaacccctacggtggccaccagggacggcaaactccccacaacgcagcttcgacgtcatatcgatctgctcgtcgggagtgccaccctctgttcggccctctatgtgggggacctgtgcggtctgtctttcttgttggccaactgtttaccctctctcccagacgccactggacaacgcaaggctgcaattgttccatctatcccggccatataacgggccaccgcatggcatgggatatgatgatgaactggtcccctacacggcgttggtaatggcacagctgctccggatcccacaagccatcatggacatgatcgctggtgctcactggggagtcctggcgggcatagcgtatttctctatggtggggaactgggcgaaggtcctgtagtgctgctgctatttgccggcgtcgacgcaaaaacttatgtcaccgggggagctgctgcccacaccacgtccggacttgctgggctcttcttacaaggccccaagcagaacgtccacttgatcaacaccaacggcagtggcacatcaatagtacggccttgaactgcaacgctagccttgacaccggctggatagcagggcttttctattacaacaaattcaactcttcaggttgtcccgagaggttggccagctgccgactcctactgattttgaccagggctggggccctatcagtcatgccaacggaagcggccccgaccaacgcccctactgctggcactaccccccaaaaccttgcggcattgtgcccgcgaagagtgtgtgtggcccggtatattgcttcctcccagccctgtggtggtgggaacgaccgacaggtcgggcgaacctacctacaactggggtgaaaatgatacggacgtcttcgtccttaacaacatcaggccaccgctgggtaattggtttggttgacctggatgaactcaaccggattcaccaaagtgtgcggggcgcctccttgtgacatcgggggggcgggcaacaacaccttgcactgccccactgattgtttccgcaagcatccggaagccacgtactctcggtgcggctccgtccctggatcacgcccaggtgcctggtccactacccatacaggctttggcattatccctgtaccatcaactacaccatatttaaagtcaggatgtacgtgggagggatcgagcacaggttggaagcgcctgcaactggacgcggggcgagcgttgcgatctggaagacagggacaggtccgagcttagcccgttgctgctgtctaccacacagtggcaagtccttccgtgttccttcacggccatgccagccttgtccaccggcctctccacctccaccagaacattgtggatgtgcagtatttgtacggggtggggtcaagcattgcgtcctgggccattaagtgggagtacgtcgttctcctgttccttttgcttgcagacgcgcgcgtctgtcctgcttgtggatgatgttactcatatcccaagcggaggcggctttggagaaccttgtaatactcaatgcagcatccctggccgggacgcacggtcttgtatccttcctcgtgttcttctgctttgcatggtatctgaaagcaggtgggtgcccggagcggcttacgccttctacgggatgtggcctctcctcctgctcctgctggcgttgccccagcgggcatacgcgctggacacggaggtggccgcgtcgtgtggcggcgttgtcttgtcgggttaatggcgctgactttatcaccacactacaagcgctatatcagctggtgcttatggtggcttcagtattttctgaccagagcggaagcgcagctgcacgtgtgggttccccccctcaacgtccgggggggggtgacgctgtcatcttactcatgtgtgttgtacacccgactctggtattcgacatcaccaaaatgctgctggccgtctatggacccctctggattcttcaagccagtttgcttgaggtaccctacttgtgcgcgtccaaggccttctccggatctgcgcgctagcgcggaagatggtcggaggccattacgtgcaaatggccatcatcaagttaggggcgcttactggcacctatatttataatcatctcacccctcttcaggactggcgcacaacggcctgcgagacctggccgcggctgtagagccagtcgtcttctcccaaatggagaccaagctcatcacgtggggggcagacactgccgcgtgcggtgacattgtcgacggcttacccgttccgcccgtaggggccgggagatactgcttgggccggccgatggaatggtctccaaggggtggaggttgctggcgcccatcacggcgtacgcccagcagacaaggggcctcctagggtgtataatcaccagcctaactggcgggacaaaaaccaagtggaaggtgaggtccagattgtgtcgactgctgcccaaactttcctggcaacgtgcatcaatggggtatgctggactgtctaccacggggccggaacgaggaccatcgcatccccaagggtcctgttatccagatgtataccaatgtagaccaagaccttgtgggctggcccgctcctcaaggtgcccgctcattgacaccctgcacctgcggctcctcggacctttacttggtcacgaggcacgccgatgtcttcccgtgcgccggcggggtgatagcaggggcagcctgctctcgccccggcctatttcctacttgaaaggctcctcgggaggtccgctgttgtgccccgcgggacacgccgtgggcatatttagggcgcggtgtgtacccgtggagtggctaaggcggtggactttatccccgtggagagcctggaaacaaccatgaggtccccggtgtttacggacaactcctccccaccagcggtgccccagaccttccaggtggcccatttgcatctcccacaggcagcggcaagagcaccaaagtcccggctgcatatgcagctcagggttataaggtgctagtgctcaacccctctgtcgctgcaacattgggctttggtgcctacatgtctaaggcccagggatcgatcctaacatcaggaccggggtgaggacaattaccactggcagccccatcacgtactccacctacggtaagttccttgccgacggcgggtgctcagggggcgcttatgacataataatctgtgacgagtgccatccacggatgccacatccatcttgggcatcggcactgtccttgaccaagcagagaccgcgggggcgagactggttgtgctcgccaccgctacccctccgggctctatcactgtgccacatcccaacatgaggaggttgctctgtccaccaccggagagatccctttttacggcaaggccatcccccttgatgtaatcaagggggggagacatctcattttctgtcactcaaagaagaagtgtgacgagcttgccgcaaagctggtcgcatgggcgtcaatgccgtggcctactaccgcggtctcgacgtatctgtcatcccgaccggcggcgatgttgtcgtcgtggcaactgatgctctcatgaccggctttactggcgacttcgactcggtgatgactgcaacacgtgcgtcacccagacagtcgatttcagccttgaccctaccttcaccattgagacaaccacgcttccccaggatgctgtctcccgcactcaacgtcggggcaggactggcagggggaggcaaggcacctacgatttgtggcaccgggggagcgcccctctggcatgttcgactcgtctgtcctctgtgagtgctatgacgcgggctgtgcttggtacgagctcacgcctgccgagaccacagttaggctacgagcgtaatgaacaccccggggcttcccgtgtgtcaagaccatcttgagttttgggagggcgtctttacaggcctcacccatatagatgcccacttcctatcccagacaaaacagagcggggagaatcttccttacctggtagcgtacaagccaccgtgtgcgctagggcgcaagccccccccccatcgtgggaccagatgtggaagtgtttggtccgcctcaaacccaccctccacgggccaacacccctgctatacagactgggtgctgttcaaatgaagtcaccctgacgcacccagtcaccaaatacatcatgacatgtatgtcggctga

SEQ ID NO: 520 - DNA, 4869 bp, Hepatitis C virus
tcgcccacaggacgtcaagttcccgggcggcggccagatcgttggtggagtttacttgttgccgcgcaggggccctagattgggtgtgcgcgcgacgaggaagacttccgagcggtcgcaacctcgagtagacgtcagcctatccccaaggcgcgtcggtccgggggcaggacctgggctcagcccgggtacccttggcccctctatggcaatgagggttgcggatgggcgggatggctcctgtccccccgtggtctcggcctagctggggccccacagacccccggcgtaggtcgcgcaatttgggcaaggtcatcgataccctcacgtgcggcttcgccgacctcatggggtacataccgctcgtcggcgcccctcttgggggcgctgccaggccctggcgcatggagtccgggttctggaagacggcgtgaattatgcaacagggaacctccccggttgctctttctctatcttccttctggccttgctctcttgcctgactgtgcccgcttcagcctacaagtgcgcaactccacggggctttaccatgtcaccaatgattgccctaattcgagtattgtgtacgaggcggccgatgctatcctgcacaccccggggtgtgtcccttgcgttcgtaagggtaacacctcggtgtgttggtggcggtaacccctacggtggccaccagggacggcaaactccccacaacgcagcttcgacgtcatatcgatctgctcgtcgggagtgccaccctctgttcggccctctatgtgggggacctgtgcggtctgtctttcttgttggccaactgtttaccctctctcccagacgccactggacaacgcaaggctgcaattgttccatctatcccggccatataacgggccaccgcatggcatgggatatgatgatgaactggtcccctacacggcgttggtaatggcacagctgctccggatcccacaagccatcatggacatgatcgctggtgctcactggggagtcctggcgggcatagcgtatttctctatggtggggaactgggcgaaggtcctgtagtgctgctgctatttgccggcgtcgacgcaaaaacttatgtcaccgggggagctgctgcccacaccgcgtccggacttgctgggctcttcttacaaggccccaagcagaacgtccacttgatcaacaccaacggcagtggcacatcaatagtacggccttgaactgcaacgctagccttgacaccggctggatagcagggcttttctattacaacaaattcaactcttcaggttgtcccgagaggttggccagctgccgactcctactgattttgaccagggctggggccctatcagtcatgccaacggaagcggccccgaccaacgcccctactgctggcactaccccccaaaaccttgcggcattgtgcccgcgaagagtgtgtgtggcccggtatactgcttcctcccagccctgtggtggtgggaacgaccgacaggtcgggcgaacctacctacaactggggtgaaaatgatacggacgtcttcgtccttaacaacatcaggccaccgctgggtaattggtttggttgacctggatgaactcaactggattcaccaaagtgtgcggggcgcctccttgtgacatcgggggggcgggcaacaacaccttgcactgccccactgattgtttccgcaagcatccggaagccacgtactctcggtgcggctccgtccctggatcacgcccaggtgcctggtccactacccatacaggctttggcattatccctgtaccatcaactacaccatatttaaagtcaggatgtacgtgggagggatcgagcacaggttggaagcgcctgcaactggacgcggggcgagcgttgcgatctggaagacagggacaggtccgagcttagcccgttgctgctgtctaccacacagtggcaagtccttccgtgttccttcacggccatgccagccttgtccaccggcctctccacctccaccagaacactgtggatgtgcagtatttgtacggggtggggtcaagcattgcgtcctgggccattaagtgggagtacgtcgttctcctgttccttttgcttgcagacgcgcgcgtctgtcctgcttgtggatgatgttactcatatcccaagcggaggcggctttggagaaccttgtaatactcaatgcagcatccctggccgggacgcacggtcttgtatccttcctcgtgttcttctgctttgcatggtatctgaaagcaggtgggtgcccggagcggcttacgccttctacgggatgtggcctctcctcctgctcctgctggcgttgccccagcgggcatacgcgctggacacggaggtggccgcgtcgtgtggcggcgttgtcttgtcgggttaatggcgctgactttatcaccacactacaagcgctatatcagctggtgcttatggtggcttcagtattttctgaccagagcggaagcgcagctgcacgtgtgggttccccccctcaacgtccgggggggggtgacgctgtcatcttactcatgtgtgttgtacacccgactctggtattcgacatcaccaaaatgctgctggccgtctatggacccctctggattcttcaagccagtttgcttgaggtaccctacttgtgcgcgtccaaggccttctccggatctgcgcgctagcgcggaagatggtcggaggccattacgtgcaaatggccatcatcaagttaggggcgcttactggcacctatatttataatcatctcacccctcttcaggactggcgcacaacggcctgcgagacctggccgcggctgtagagccagtcgtcttctcccaaatggagaccaagctcatcacgtggggggcagacactgccgcgtgcggtgacattgtcgacggcttacccgttccgcccgtaggggccgggagatactgcttgggccggccgatggaatggtctccaaggggtggaggttgctggcgcccatcacggcgtacgcccagcagacaaggggcctcctagggtgtataatcaccagcctaactggcgggacaaaaaccaagtggaaggtgaggtccagattgtgtcgactgctgcccaaactttcctggcaacgtgcatcaatggggtatgctggactgtctaccacggggccggaacgaggaccatcgcatccccaagggtcctgttatccagatgtataccaatgtagaccaagaccttgtgggctggcccgctcctcaaggtgcccgctcattgacaccctgcacctgcggctcctcggacctttacttggtcacgaggcacgccgatgtcttcccgtgcgccggcggggtgatagcaggggcagcctgctctcgccccggcctatttcctacttgaaaggctcctcgggaggtccgctgttgtgccccgcgggacacgccgtgggcatatttagggcgcggtgtgtacccgtggagtggctaaggcggtggactttatccccgtggagagcctggaaacaaccatgaggtccccggtgtttacggacaactcctccccaccagcggtgccccagaccttccaggtggcccatttgcatctcccacaggcagcggcaagagcaccaaagtcccggctgcatatgcagctcagggttataaggtgctagtgctcaacccctctgtcgctgcaacattgggctttggtgcctacatgtctaaggcccagggatcgatcctaacatcaggaccggggtgaggacaattaccactggcagccccatcacgtactccacctacggtaagttccttgccgacggcgggtgctcagggggcgcttatgacataataatctgtgacgagtgccatccacggatgccacatccatcttgggcatcggcactgtccttgaccaagcagagaccgcgggggcgagactggttgtgctcgccaccgctacccctccgggctctatcactgtgccacatcccaacatgaggaggttgctctgtccaccaccggagagatccctttttacggcaaggccatcccccttgatgtaatcaagggggggagacatctcattttctgtcactcaaagaagaagtgtgacgagcttgccgcaaagctggtcgcatgggcgtcaatgccgtggcctactaccgcggtctcgacgtatctgtcatcccgaccggcggcgatgttgtcgtcgtggcaactgatgctctcatgaccggctttactggcgacttcgactcggtgatgactgcaacacgtgcgtcacccagacagtcgatttcagccttgaccctaccttcaccattgagacgaccacgcttccccaggatgctgtctcccgcactcaacgtcggggcaggactggcagggggaggcaaggcacctacgatttgtggcaccgggggagcgcccctctggcatgttcgactcgtctgtcctctgtgagtgctatgacgcgggctgtgcttggtacgagctcacgcctgccgagaccacagttaggctacgagcgtaatgaacaccccggggcttcctgtgtgtcaagaccatcttgaattttgggagggcgtctttacaggcctcacccatatagatgcccacttcctatcccagacaaaacagagcggggagaatcttccttacctggtagcgtacaagccaccgtgtgcgctagggcgcaagccccccccccatcgtgggaccagatgtggaagtgtttggtccgcctcaaacccaccctccacgggccaacacccctgctatacagactgggtgctgttcaaatgaagtcaccctgacgcacccagtcaccaaatacatcatgacatgtatgtcggctga

SEQ ID NO: 521 - DNA, 4869 bp, Hepatitis C virus; identical to SEQ ID NO: 474

SEQ ID NO: 522 - DNA, 4869 bp, Hepatitis C virus
tcgcccacaggacgtcaagttcccgggcggcggccagatcgttggtggagtttacttgttgccgcgcaggggccctagattgggtgtgcgcgcgacgaggaagacttccgagcggtcgcaacctcgagtagacgtcagcctatccccaaggcgcgtcggtccgagggcaggacctgggctcagcccgggtacccttggcccctctatggcaatgagggttgcggatgggcgggatggctcctgtccccccgtggtctcggcctagctggggccccacagacccccggcgtaggtcgcgcaatttgggcaaggtcatcgataccctcacgtgcggcttcgccgacctcatggggtacataccgctcgtcggcgcccctcttgggggcgctgccaggccctggcgcatggagtccgggttctggaagacggcgtgaattatgcaacagggaacctccccggttgctctttctctatcttccttctggccttgctctcttgcctgactgtgcccgcttcagcctacaagtgcgcaactccacggggctttaccatgtcaccaatgattgccctaattcgagtattgtgtacgaggcggccgatgctatcctgcacaccccggggtgtgtcccttgcgttcgtaagggtaacacctcggtgtgttggtggcggtaacccctacggtggccaccagggacggcaaactccccacaacgcagcttcgacgtcatatcgatctgctcgtcgggagtgccaccctctgttcggccctctatgtgggggacctgtgcggtctgtctttcttgttggccaactgtttaccctctctcccagacgccactggacaacgcaaggctgcaattgttccatctatcccggccatataacgggccaccgcatggcatgggatatgatgatgaactggtcccctacacggcgttggtaatggcacagctgctccggatcccacaagccatcatggacatgatcgctggtgctcactggggagtcctggcgggcatagcgtatttctctatggtggggaactgggcgaaggtcctgtagtgctgctgctatttgccggcgtcgacgcaaaaacttatgtcaccgggggagctgctgcccacaccacgtccggacttgctgggctcttcttacaaggccccaagcagaacgtccacttgatcaacaccaacggcagtggcacatcaatagtacggccttgaactgcaacgctagccttgacaccggctggatagcagggcttttctattacaacaaattcaactcttcaggttgtcccgagaggttggccagctgccgactcctactgattttgaccagggctggggccctatcagtcatgccaacggaagcggccccgaccaacgcccctactgctggcactaccccccaaaaccttgcggcattgtgcccgcgaagagtgtgtgtggcccggtatattgcttcctcccagccctgtggtggtgggaacgaccgacaggtcgggcgaacctacctacaactggggtgaaaatgatacggacgtcttcgtccttaacaacatcaggccaccgctgggtaattggtttggttgacctggatgaactcaaccggattcaccaaagtgtgcggggcgcctccttgtgacatcgggggggcgggcaacaacaccttgcactgccccactgattgtttccgcaagcatccggaagccacgtactctcggtgcggctccgtccctggatcacgcccaggtgcctggtccactacccatacaggctttggcattatccctgtaccatcaactacaccatatttaaagtcaggatgtacgtgggagggatcgagcacaggttggaagcgcctgcaactggacgcggggcgagcgttgcgatctggaagacagggacaggtccgagcttagcccgttgctgctgtctaccacacagtggcaagtccttccgtgttccttcacggccatgccagccttgtccaccggcctctccacctccaccagaacattgtggatgtgcagtatttgtacggggtggggtcaagcattgcgtcctgggccattaagtgggagtacgtcgttctcctgttccttttgcttgcagacgcgcgcgtctgtcctgcttgtggatgatgttactcatatcccaagcggaggcggctttggagaaccttgtaatactcaatgcagcatccctggccgggacgcacggtcttgtatccttcctcgtgttcttctgctttgcatggtatctgaaagcaggtgggtgcccggagcggcttacgccttctacgggatgtggcctctcctcctgctcctgctggcgttgccccagcgggcatacgcgctggacacggaggtggccgcgtcgtgtggcggcgttgtcttgtcgggttaatggcgctgactttatcaccacactacaagcgctatatcagctggtgcttatggtggcttcagtattttctgaccagagcggaagcgcagctgcacgtgtgggttccccccctcaacgtccgggggggggtgacgctgtcatcttactcatgtgtgttgtacacccgactctggtattcgacatcaccaaaatgctgctggccgtctatggacccctctggattcttcaagccagtttgcttgaggtaccctacttgtgcgcgtccaaggccttctccggatctgcgcgctagcgcggaagatggtcggaggccattacgtgcaaatggccatcatcaagttaggggcgcttactggcacctatatttataatcatctcacccctcttcaggactggcgcacaacggcctgcgagacctggccgcggctgtagagccagtcgttttctcccaaatggagaccaagctcatcacgtggggggcagacactgctgcgtgcggtgacattgtcgacggcttacccgttccgcccgtaggggccgggagatactgcttgggccggccgatggaatggtctccaaggggtggaggttgctggcgcccatcacggcgtacgcccagcagacaaggggcctcctagggtgtataatcaccagcctaactggcgggacaaaaaccaagtggaaggtgaggtccagattgtgtcgactgctgcccaaactttcctggcaacgtgcatcaatggggtatgctggactgtctaccacggggccggaacgaggaccatcgcatccccaagggtcctgttatccagatgtataccaatgtagaccaagaccttgtgggctggcccgctcctcaaggtgcccgctcattgacaccctgcacctgcggctcctcggacctttacttggtcacgaggcacgccgatgtcttcccgtgcgccggcggggtgatagcaggggcagcctgctctcgccccggcctatttcctacttgaaaggctcctcgggaggtccgctgttgtgccccgcgggacacgccgtgggcatatttagggcgcggtgtgtacccgtggagtggctaaggcggtggactttatccccgtggagagcctggaaacaaccatgaggtccccggtgtttacggacaactcctccccaccagcggtgccccagaccttccaggtggcccatttgcatctcccacaggcagcggcaagagcaccaaagtcccggctgcatatgcagctcagggttataaggtgctagtgctcaacccctctgtcgctgcaacattgggctttggtgcctacatgtctaaggcccagggatcgatcctaacatcaggaccggggtgaggacaattaccactggcagccccatcacgtactccacctacggtaagttccttgccgacggcgggtgctcagggggcgcttatgacataataatctgtgacgagtgccatccacggatgccacatccatcttgggcatcggcactgtccttgaccaagcagagaccgcgggggcgagactggttgtgctcgccaccgctacccctccgggctctatcactgtgccacatcccaacatgaggaggttgctctgtccaccaccggagagatccctttttacggcaaggccatcccccttgatgtaatcaagggggggagacatctcattttctgtcactcaaagaagaagtgtgacgagcttgccgcaaagctggtcgcatgggcgtcaatgccgtggcctactaccgcggtctcgacgtatctgtcatcccgaccggcggcgatgttgtcgtcgtggcaactgatgctctcatgaccggctttactggcgacttcgactcggtgatgactgcaacacgtgcgtcacccagacagtcgatttcagccttgaccctaccttcaccattgagacaaccacgcttccccaggatgctgtctcccgcactcaacgtcggggcaggactggcagggggaggcaaggcacctacgatttgtggcaccgggggagcgcccctctggcatgttcgactcgtctgtcctctgtgagtgctatgacgcgggctgtgcttggtacgagctcacgcctgccgagaccacagttaggctacgagcgtaatgaacaccccggggcttcccgtgtgtcaagaccatcttgaattttgggagggcgtctttacaggcctcacccatatagatgcccacttcctatcccagacaaaacagagcggggagaatcttccttacctggtagcgtacaagccaccgtgtgcgctagggcgcaagccccccccccatcgtgggaccagatgtggaagtgtttggtccgcctcaaacccaccctccacgggccaacacccctgctatacagactgggtgctgttcaaatgaagtcaccctgacgcacccagtcaccaaatacatcatgacatgtatgtcggctga

SEQ ID NO: 523 - DNA, 4873 bp, Hepatitis C virus
caaccgtcgcccacaggacgttaagttcccgggtggcggtcagatcgttggtggagtttacttgttgccgcgcaggggccctagattgggtgtgcgcgcgacgaggaagacttccgagcggtcgcaactcgcggtagacgtcagcctatccccaaggcgcgtcggcccgagggcaggacctgggctcagcccgggtacccctggcccctctacggcaatgagggctgcgggtgggcgggatggctcctgtcccccgtggctctcggcctagctggggccccacagacccccggcgtaggtcgcgcaatttgggtaaggtcatcgacaccctcacgtgcggcttcgccgacctcatggggtacattccgctcgtcggcgcccctcttgggggcgctccagggccctggcgcatggcgtccgggtcctggaagacggcgtgaattatgcaacagggaaccttcctggttgctctttttctatcttccttctggccctgctctcttgcctgaccgtgcccgcgtcgcctatcaagtacgcaactcctcgggcctctaccatgtcaccaatgattgccctaactcgagtattgtgtacgagacggccgataccattctacattctccggggtgtgtcccttgcgttcgcgagggtaacgcctcgaaagttgggtggcggtggcccccacagtcgccaccagggatggcagactccccacaacgcagcttcgacgtcacatcgatctgcttgtcgggagcgccaccctctgctcggccctctatgtgggggactttgcgggtctgtcttccttgtcggtcaactgttcactttctcccccaggcgccactggacaacgcaagactgcaactgttctatctaccccggccatataacgggtcaccgcatggcatgggatatgatgatgaactggtccctacagcagcgctggtagtagctcagctgctcagggtcccgcaagccatcttggacatgatcgctggtgcccactggggagtcctagcgggcatagcgtatttctccatggtggggaactgggcgaagtcttagtggtgctgttgctgtttgccggcgttgatgcgggaacccacatcaccggggggagtgtcgctcattccacggcacgactcaccggtcttttcagtcgtggctcccagcagcatatccagctgatcaacaccaacgcagttggcacatcaatcgcacggccctgaactgtaatgaaagcctcaacactggctggctagcggggctcttctattccaacaaattcaactcttcaggctgccccgagaggttggccagctgtagccccttgccgatttcgaccagggctggggtcctatcagctacgccaacggaagcggccccgaccaccggccctactgctggcactaccccccaaagccttgtggtatcgtgccagcacagagcgtatgtggcccagtgtatgcttcacacccagccccgtggtggtgggaacgaccaacaagttgggcgcgcctacctacaactggggttgcaatgatacggacgtcttcgtccttaataacaccaggccgccgttgggcaattggttggttgcacctggatgaactcatctggatttaccaaagtgtgcggagcgcctccttgtgtcatcggaggggggggcaacaacaccttgcactgccccactgactgtttccgcaagcatccggaagccacatactctcggtgtgctccggtccctggatcacgcccaggtgcctggtccactatccttataggctttggcattatccttgtactgtcaactacaccatgttcaaagtcaggatgtacgtgggaggggtcgagcacaggctgacgttgcttgcaactggacgcggggcgagcgttgcgatctggacgacagggacaggtccgagctcagcccgctgctgctgtccaccacacagtggcaggtccttccgtgttcctttaccaccttgccggccttgactaccgcctcatccacctccaccagaacatcgtggatgtgcaatacttgtacggggtggggtcaagcattgtgtcctgggccatcaagtgggaatacgtcatcctcttatttctcctgcttgcagacgcgcgatctgctcctgcttgtggatgatgctactcatatcccaagcggaggcagcgttggagaaccttgtgttgctcaacgcggcgtctctggccgggacgcatggccttgcgtccttcctcgtgtttttctgctttgcatggtattgaagggtaagtgggcgcccggagcagcctacgccttctacgggatgtggcctctcctcctgctcctgttggcgttgccccagcgggcatacgcgctggacacggagatggccgcgtcgtgtggcgggttgttattgtcgggttaatggcgctgactctgtcaccgcactacaagcgctacatcagctggtgcttatggtggcttcagtatttcttgaccagagtagaagcgcaactgcacgtgtgggttccccccctcaacgtccgggggggcgtgacgctgtcatcctactcatgtgtgctgtacacccggctttggtatttgacatcaccaagctgctgttggccgtcttcggccctctttggattcttcaaaccagtctgctcaaagtgcctatttcgtgcgcgttcaaggccttctccggatctgcgcgctagcgcgcaagatggccggcggccattacgtgcaaatggccatcatcaagatgggggcgcttactggcacctatgtttataaccatctcactcctcttcggactgggcgcacaacggcctacgagatctggccgtggctgtagagccagtcgtcttctcccagatggagaccaagctcatcacgtggggggcggacaccgccgcgtgcggtgacatcatcaacggcttcccgtctctgcccgtaggggccgagagatactgctcggaccggccgatggaatggtctccaaggggtggaggttgctggcgcccatcacggcgtatgcccagcagacaaggggcctcttgggatgcataataaccagcctgccggccgggacaaaaaccaggtggagggtgaggttcagattgtgtcaactgctgcccagacctttctggcaacctgcatcaacggggtgtgctggactgtctaccacggggccggaacaaggaccatgcatcacccaaaggtcctgttatccagatgtacaccaatgtagaccaagacctcgtaggctggcccgctccccaaggtgcccgctcattgacaccctgcacttgcggctcctcggacctttacctggtcacgaggcacgccatgtcattcccgtacgccgacggggtgatagcaggggcagcctgctttcgccccggcctatctcttacttgaaaggctcctcggggggtccactactgtgccccgcgggacacgccgtaggcatattagggccgcggtgtgcacccgtggagtggctaaggcggtggactttatccccgtagagagcctagagacaaccatgaggtccccggtgttcacagacaattcctccccaccagcagtgccccagagcctccaggtggctcactgcatgctcccaccggcagcggtaagagcaccaaggtcccggccgcatacgcggctcaggggtacaaggtgttggtgctcaacccctccgttgctgcaacactgggttttggtgcctacatgtccaagcccatggggttgatcctaacatcaggactggggtgaggacaattactactggcagctccatcacgtactccacctacggcaagttcctcgccgacggcgggtgctcggggggtgcttatgacataataatttgtgacgaggccactccacggatgcaacatctatcttgggcatcggcaccgtccttgaccaagcagagactgcgggggcgagactggttgtgctcgccaccgctactcctccgggctccgtcaccgtgccccatccaacatcgaggaggttgctctgtctaccaccggagagatccccttttacggcaaggctatcccccttgaggcaatcaagggagggagacatctcattttctgccactcaaagaagaagtgcgacgagctcgccgcaaaactgtcgcgatgggcatcaatgccgtggcttactaccgcggccttgacgtgtccgtcatcccgaccagtggcgacgttgtcgttgtggcaactgatgctctcatgaccggctataccggcgacttcgactcgtgatagactgcaacacgtgtgtcacccagacagtcgacttcagccttgaccccaccttcaccattgagacaaccacacttcctcaggacgctgtctcccgcacccaacgtcggggcaggactggcagggggaagccaggctctacagatttgtggcaccgggagagcgcccttccggcatgttcgactcgtccgtcctctgtgagtgctatgacgcaggctgtgcttggtatgagctcacacccgccgagaccacagtcaggctacggcatacatgaacactccggggcttcccgtgtgccaagaccatcttgaattttgggagggcgtcttcacgggtctcacccatatagacgcccacttcctatctcagacaaagcagagtggggaaaactttccttacctggtacgtaccaagccaccgtgtgcgctagagctcaagctccccccccatcgtgggaccagatgtggaagtgcttgatccgcctcaaacccaccctccatgggccaacacctctgctatacaggctgggcgcgttcagaatgaagtcaccctgacgcacccaatcaccaagtacatcatgacatgcatgtcggct

SEQ ID NO: 524 - DNA, 4873 bp, Hepatitis C virus
caaccgtcgcccacaggacgttaagttcccgggtggcggtcagatcgttggtggagtttacttgttgccgcgcaggggccctagattgggtgtgcgcgcgacgaggaagacttccgagcggtcgcaactcgcggtagacgtcagcctatccccaaggcgcgtcggcccgagggcaggacctgggctcagcccgggtacccctggcccctctacggcaatgagggctgcgggtgggcgggatggctcctgtcccccgtggctctcggcctagctggggccccacagacccccggcgtaggtcgcgcaatttgggtaaggtcatcgacaccctcacgtgcggcttcgccgacctcatggggtacattccgctcgtcggcgcccctcttgggggcgctccagggccctggcgcatggcgtccgggtcctggaagacggcgtgaattatgcaacagggaaccttcctggttgctctttttctatcttccttctggccctgctctcttgcctgaccgtgcccgcgtcgcctatcaagtacgcaactcctcgggcctctaccatgtcaccaatgattgccctaactcgagtattgtgtacgagacggccgataccattctacattctccggggtgtgtcccttgcgttcgcgagggtaacgcctcgaaagttgggtggcggtggcccccacagtcgccaccagggatggcagactccccacaacgcagcttcgacgtcacatcgatctgcttgtcgggagcgccaccctctgctcggccctctatgtgggggactttgcgggtctgtcttccttgtcggtcaactgttcactttctcccccaggcgccactggacaacgcaagactgcaactgttctatctaccccggccatataacgggtcaccgcatggcatgggatatgatgatgaactggtccctacagcagcgctggtagtagctcagctgctcagggtcccgcaagccatcttggacatgatcgctggtgcccactggggagtcctagcgggcatagcgtatttctccatggtggggaactgggcgaagtcttagtggtgctgttgctgtttgccggcgttgatgcgggaacccacatcaccggggggagtgtcgctcattccacggcacgactcaccggtcttttcagtcgtggctcccagcagcatatccagctgatcaacaccaacgcagttggcacatcaatcgcacggccctgaactgtaatgaaagcctcaacactggctggctagcggggctcttctattccaacaaattcaactcttcaggctgccccgagaggttggccagctgtagccccttgccgatttcgaccagggctggggtcctatcagctacgccaacggaagcggccccgaccaccggccctactgctggcactaccccccaaagccttgtggtatcgtgccagcacagagcgtatgtggcccagtgtatgcttcacacccagccccgtggtggtgggaacgaccaacaagttgggcgcgcctacctacaactggggttgcaatgatacggacgtcttcgtccttaataacaccaggccgccgttgggcaattggttggttgcacctggatgaactcatctggatttaccaaagtgtgcggagcgcctccttgtgtcatcggaggggggggcaacaacaccttgcactgccccactgactgtttccgcaagcatccggaagccacatactctcggtgtgctccggtccctggatcacgcccaggtgcctggtccactatccttataggctttggcattatccttgtactgtcaactacaccatgttcaaagtcaggatgtacgtgggaggggtcgagcacaggctgacgttgcttgcaactggacgcggggcgagcgttgcgatctggacgacagggacaggtccgagctcagcccgctgctgctgtccaccacacagtggcaggtccttccgtgttcctttaccaccttgccagccttgactaccgcctcatccacctccaccagaacatcgtggatgtgcaatacttgtacggggtggggtcaagcattgtgtcctgggccatcaagtgggaatacgtcatcctcttatttctcctgcttgcagacgcgcgatctgctcctgcttgtggatgatgctactcatatcccaagcggaggcagcgttggagaaccttgtgttgctcaacgcggcgtctctggccgggacgcatggccttgcgtccttcctcgtgtttttctgctttgcatggtattgaagggtaagtgggcgcccggagcagcctacgccttctacgggatgtggcctctcctcctgctcctgttggcgttgccccagcgggcatacgcgctggacacggagatggccgcgtcgtgtggcgggttgttattgtcgggttaatggcgctgactctgtcaccgcactacaagcgctacatcagctggtgcttatggtggcttcagtatttcttgaccagagtagaagcgcaactgcacgtgtgggttccccccctcaacgtccgggggggcgtgacgctgtcatcctactcatgtgtgctgtacacccggctttggtatttgacatcaccaagctgctgttggccgtcttcggccctctttggattcttcaaaccagtctgctcaaagtgcctatttcgtgcgcgttcaaggccttctccggatctgcgcgctagcgcgcaagatggccggcggccattacgtgcaaatggccatcatcaagatgggggcgcttactggcacctatgtttataaccatctcactcctcttcggactgggcgcacaacggcctacgagatctggccgtggctgtagagccagtcgtcttctcccagatggagaccaagctcatcacgtggggggcggacaccgccgcgtgcggtgacatcatcaacggcttcccgtctctgcccgtaggggccgagagatactgctcggaccggccgatggaatggtctccaaggggtggaggttgctggcgcccatcacggcgtatgcccagcagacaaggggcctcttgggatgcataataaccagcctgccggccgggacaaaaaccaggtggagggtgaggttcagattgtgtcaactgctgcccagacctttctggcaacctgcatcaacggggtgtgctggactgtctaccacggggccggaacaaggaccatgcatcacccaaaggtcctgttatccagatgtacaccaatgtagaccaagacctcgtaggctggcccgctccccaaggtgcccgctcattgacaccctgcacttgcggctcctcggacctttacctggtcacgaggcacgccatgtcattcccgtacgccgacggggtgatagcaggggcagcctgctttcgccccggcctatctcttacttgaaaggctcctcggggggtccactactgtgccccgcgggacacgccgtaggcatattagggccgcggtgtgcacccgtggagtggctaaggcggtggactttatccccgtagagagcctagagacaaccatgaggtccccggtgttcacagacaattcctccccaccagcagtgccccagagcttccaggtggctcactgcatgctcccaccggcagcggtaagagcaccaaggtcccggccgcatacgcggctcaggggtacaaggtgttggtgctcaacccctccgttgctgcaacactgggttttggtgcctacatgtccaagcccatggggttgatcctaacatcaggactggggtgaggacaattactactggcagctccatcacgtactccacctacggcaagttcctcgccgacggcgggtgctcggggggtgcttatgacataataatttgtgacgaggccactccacggatgcaacatctatcttgggcatcggcaccgtccttgaccaagcagagactgcgggggcgagactggttgtgctcgccaccgctactcctccgggctccgtcaccgtgccccatccaacatcgaggaggttgctctgtctaccaccggagagatccccttttacggcaaggctatcccccttgaggcaatcaagggagggagacatctcattttctgccactcaaagaagaagtgcgacgagctcgccgcaaaactgtcgcgatgggcatcaatgccgtggcttactaccgcggccttgacgtgtccgtcatcccgaccagtggcgacgttgtcgttgtggcaactgatgctctcatgaccggctataccggcgacttcgactcgtgatagactgcaacacgtgtgtcacccagacagtcgacttcagccttgaccctaccttcaccattgagacaaccacacttcctcaggacgctgtctcccgcacccaacgtcggggcaggactggcagggggaagccaggctctacagatttgtggcaccgggagagcgcccttccggcatgttcgactcgtccgtcctctgtgagtgctatgacgcaggctgtgcttggtatgagctcacacccgccgagaccacagtcaggctacggcatacatgaacactccggggcttcccgtgtgccaagaccatcttgaattttgggagggcgtcttcacgggtctcacccatatagacgcccacttcctatctcagacaaagcagagtggggaaaactttccttacctggtacgtaccaagccaccgtgtgcgctagagctcaagctccccccccatcgtgggaccagatgtggaagtgcttgatccgcctcaaacccaccctccatgggccaacacctctgctatacaggctgggcgcgttcagaatgaagtcaccctgacgcacccaatcaccaagtacatcatgacatgcatgtcggct

SEQ ID NO: 525 - DNA, 4873 bp, Hepatitis C virus
caaccgtcgcccacaggacgttaagttcccgggtggcggtcagatcgttggtggagtttacttgttgccgcgcaggggccctagattgggtgtgcgcgcgacgaggaagacttccgagcggtcgcaactcgcggtagacgtcagcctatccccaaggcgcgtcggcccgagggcaggacctgggctcagcccgggtacccctggcccctctacggcaatgagggctgcgggtgggcgggatggctcctgtcccccgtggctctcggcctagctggggccccacagacccccggcgtaggtcgcgcaatttgggtaaggtcatcgacaccctcacgtgcggcttcgccgacctcatggggtacattccgctcgtcggcgcccctcttgggggcgctccagggccctggcgcatggcgtccgggtcctggaagacggcgtgaattatgcaacagggaaccttcctggttgctctttttctatcttccttctggccctgctctcttgcctgaccgtgcccgcgtcgcctatcaagtacgcaactcctcgggcctctaccatgtcaccaatgattgccctaactcgagtattgtgtacgagacggccgataccattctacattctccggggtgtgtcccttgcgttcgcgagggtaacgcctcgaaagttgggtggcggtggcccccacagtcgccaccagggatggcagactccccacaacgcagcttcgacgtcacatcgatctgcttgtcgggagcgccaccctctgctcggccctctatgtgggggactttgcgggtctgtcttccttgtcggtcaactgttcactttctcccccaggcgccactggacaacgcaagactgcaactgttctatctaccccggccatataacgggtcaccgcatggcatgggatatgatgatgaactggtccctacagcagcgctggtagtagctcagctgctcagggtcccgcaagccatcttggacatgatcgctggtgcccactggggagtcctagcgggcatagcgtatttctccatggtggggaactgggcgaagtcttagtggtgctgttgctgtttgccggcgttgatgcgggaacccacatcaccggggggagtgtcgctcattccacggcacgactcaccggtcttttcagtcgtggctcccagcagcatatccagctgatcaacaccaacgcagttggcacatcaatcgcacggccctgaactgtaatgaaagcctcaacactggctggctagcggggctcttctattccaacaaattcaactcttcaggctgccccgagaggttggccagctgtagccccttgccgatttcgaccagggctggggtcctatcagctacgccaacggaagcggccccgaccaccggccctactgctggcactaccccccaaagccttgtggtatcgtgccagcacagagcgtatgtggcccagtgtatgcttcacacccagccccgtggtggtgggaacgaccaacaagttgggcgcgcctacctacaactggggttgcaatgatacggacgtcttcgtccttaataacaccaggccgccgttgggcaattggttggttgcacctggatgaactcatctggatttaccaaagcgtgcggagcgcctccttgtgtcatcggaggggggggcaacaacaccttgcactgccccactgactgtttccgcaagcatccggaagccacatactctcggtgtgctccggtccctggatcacgcccaggtgcctggtccactatccttataggctttggcattatccttgtactgtcaactacaccatgttcaaagtcaggatgtacgtgggaggggtcgagcacaggctgacgttgcttgcaactggacgcggggcgagcgttgcgatctggacgacagggacaggtccgagctcagcccgctgctgctgtccaccacacagtggcaggtccttccgtgttcctttaccaccttgccagccttgactaccgcctcatccacctccaccagaacatcgtggatgtgcaatacttgtacggggtggggtcaagcattgtgtcctgggccatcaagtgggaatacgtcatcctcttatttctcctgcttgcagacgcgcgatctgctcctgcttgtggatgatgctactcatatcccaagcggaggcagcgttggagaaccttgtgttgctcaacgcggcgtctctggccgggacgcatggccttgcgtccttcctcgtgtttttctgctttgcatggtattgaagggtaagtgggcgcccggagcagcctacgccttctacgggatgtggcctctcctcctgctcctgttggcgttgccccagcgggcatacgcgctggacacggagatggccgcgtcgtgtggcgggttgttattgtcgggttaatggcgctgactctgtcaccgcactacaagcgctacatcagctggtgcttatggtggcttcagtatttcttgaccagagtagaagcgcaactgcacgtgtgggttccccccctcaacgtccgggggggcgtgacgctgtcatcctactcatgtgtgctgtacacccggctttggtatttgacatcaccaagctgctgttggccgtcttcggccctctttggattcttcaaaccagtctgctcaaagtgcctatttcgtgcgcgttcaaggccttctccggatctgcgcgctagcgcgcaagatggccggcggccattacgtgcaaatggccatcatcaagatgggggcgcttactggcacctatgtttataaccatctcactcctcttcggactgggcgcacaacggcctacgagatctggccgtggctgtagagccagtcgtcttctcccagatggagaccaagctcatcacgtggggggcggacaccgccgcgtgcggtgacatcatcaacggcttcccgtctctgcccgtaggggccgagagatactgctcggaccggccgatggaatggtctccaaggggtggaggttgctggcgcccatcacggcgtatgcccagcagacaaggggcctcttgggatgcataataaccagcctgccggccgggacaaaaaccaggtggagggtgaggttcagattgtgtcaactgctgcccagacctttctggcaacctgcatcaacggggtgtgctggactgtctaccacggggccggaacaaggaccatgcatcacccaaaggtcctgttatccagatgtacaccaatgtagaccaagacctcgtaggctggcccgctccccaaggtgcccgctcattgacaccctgcacttgcggctcctcggacctttacctggtcacgaggcacgccatgtcattcccgtacgccgacggggtgatagcaggggcagcctgctttcgccccggcctatctcttacttgaaaggctcctcggggggtccactactgtgccccgcgggacacgccgtaggcatattagggccgcggtgtgcacccgtggagtggctaaggcggtggactttatccccgtagagagcctagagacaaccatgaggtccccggtgttcacagacaattcctccccaccagcagtgccccagagcttccaggtggctcactgcatgctcccaccggcagcggtaagagcaccaaggtcccggccgcatacgcggctcaggggtacaaggtgttggtgctcaacccctccgttgctgcaacactgggttttggtgcctacatgtccaagcccatggggttgatcctaacatcaggactggggtgaggacaattactactggcagctccatcacgtactccacctacggcaagttcctcgccgacggcgggtgctcggggggtgcttatgacataataatttgtgacgaggccactccacggatgcaacatctatcttgggcatcggcaccgtccttgaccaagcagagactgcgggggcgagactggttgtgctcgccaccgctactcctccgggctccgtcaccgtgccccatccaacatcgaggaggttgctctgtctaccaccggagagatccccttttacggcaaggctatcccccttgaggcaatcaagggagggagacatctcattttctgccactcaaagaagaagtgcgacgagctcgccgcaaaactgtcgcgatgggcatcaatgccgtggcttactaccgcggccttgacgtgtccgtcatcccgaccagtggcgacgttgtcgttgtggcaactgatgctctcatgaccggctataccggcgacttcgactcgtgatagactgcaacacgtgtgtcacccagacagtcgacttcagccttgaccctaccttcaccattgagacaaccacacttcctcaggacgctgtctcccgcacccaacgtcggggcaggactggcagggggaagccaggctctacagatttgtggcaccgggagagcgcccttccggcatgttcgactcgtccgtcctctgtgagtgctatgacgcaggctgtgcttggtatgagctcacacccgccgagaccacagtcaggctacggcatacatgaacactccggggcttcccgtgtgccaagaccatcttgaattttgggagggcgtcttcacgggtctcacccatatagacgcccacttcctatctcagacaaagcagagtggggaaaactttccttacctggtacgtaccaagccaccgtgtgcgctagagctcaagctccccccccatcgtgggaccagatgtggaagtgcttgatccgcctcaaacccaccctccatgggccaacacctctgctatacaggctgggcgcgttcagaatgaagtcaccctgacgcacccaatcaccaagtacatcatgacatgcatgtcggct

SEQ ID NO: 526 - DNA, 4873 bp, Hepatitis C virus
caaccgtcgcccacaggacgttaagttcccgggtggcggtcagatcgttggtggagtttacttgttgccgcgcaggggccctagattgggtgtgcgcgcgacgaggaagacttccgagcggtcgcaactcgcggtagacgtcagcctatccccaaggcgcgtcggcccgagggcaggacctgggctcagcccgggtacccctggcccctctacggcaatgagggctgcgggtgggcgggatggctcctgtcccccgtggctctcggcctagctggggccccacagacccccggcgtaggtcgcgcaatttgggtaaggtcatcgacaccctcacgtgcggcttcgccgacctcatggggtacattccgctcgtcggcgcccctcttgggggcgctccagggccctggcgcatggcgtccgggtcctggaagacggcgtgaattatgcaacagggaaccttcctggttgctctttttctatcttccttctggccctgctctcttgcctgaccgtgcccgcgtcgcctatcaagtacgcaactcctcgggcctctaccatgtcaccaatgattgccctaactcgagtattgtgtacgagacggccgataccattctacattctccggggtgtgtcccttgcgttcgcgagggtaacgcctcgaaagttgggtggcggtggcccccacagtcgccaccagggatggcagactccccacaacgcagcttcgacgtcacatcgatctgcttgtcgggagcgccaccctctgctcggccctctatgtgggggactttgcgggtctgtcttccttgtcggtcaactgttcactttctcccccaggcgccactggacaacgcaagactgcaactgttctatctaccccggccatataacgggtcaccgcatggcatgggatatgatgatgaactggtccctacagcagcgctggtagtagctcagctgctcagggtcccgcaagccatcttggacatgatcgctggtgcccactggggagtcctagcgggcatagcgtatttctccatggtggggaactgggcgaagtcttagtggtgctgttgctgtttgccggcgttgatgcgggaacccacatcaccggggggagtgtcgctcattccacggcacgactcaccggtcttttcagtcgtggctcccagcagcatatccagctgatcaacaccaacgcagttggcacatcaatcgcacggccctgaactgtaatgaaagcctcaacactggctggctagcggggctcttctattccaacaaattcaactcttcaggctgccccgagaggttggccagctgtagccccttgccgatttcgaccagggctggggtcctatcagctacgccaacggaagcggccccgaccaccggccctactgctggcactaccccccaaagccttgtggtatcgtgccagcacagagcgtatgtggcccagtgtatgcttcacacccagccccgtggtggtgggaacgaccaacaagttgggcgcgcctacctacaactggggttgcaatgatacggacgtcttcgtccttaacaacaccaggccgccgttgggcaattggttggttgcacctggatgaactcatctggatttaccaaagtgtgcggagcgcctccttgtgtcatcggaggggggggcaacaacaccttgcactgccccactgactgtttccgcaagcatccggaagccacatactctcggtgtgctccggtccctggatcacgcccaggtgcctggtccactatccttataggctttggcattatccttgtactgtcaactacaccatgttcaaagtcaggatgtacgtgggaggggtcgagcacaggctgacgttgcttgcaactggacgcggggcgagcgttgcgatctggacgacagggacaggtccgagctcagcccgctgctgctgtccaccacacagtggcaggtccttccgtgttcctttaccaccttgccagccttgactaccgcctcatccacctccaccagaacatcgtggatgtgcaatacttgtacggggtggggtcaagcattgtgtcctgggccatcaagtgggaatacgtcatcctcttatttctcctgcttgcagacgcgcgatctgctcctgcttgtggatgatgctactcatatcccaagcggaggcagcgttggagaaccttgtgttgctcaacgcggcgtctctggccgggacgcatggccttgcgtccttcctcgtgtttttctgctttgcatggtattgaagggtaagtgggcgcccggagcagcctacgccttctacgggatgtggcctctcctcctgctcctgttggcgttgccccagcgggcatacgcgctggacacggagatggccgcgtcgtgtggcgggttgttattgtcgggttaatggcgctgactctgtcaccgcactacaagcgctacatcagctggtgcttatggtggcttcagtatttcttgaccagagtagaagcgcaactgcacgtgtgggttccccccctcaacgtccgggggggcgtgacgctgtcatcctactcatgtgtgctgtacacccggctttggtatttgacatcaccaagctgctgttggccgtcttcggccctctttggattcttcaaaccagtctgctcaaagtgcctatttcgtgcgcgttcaaggccttctccggatctgcgcgctagcgcgcaagatggccggcggccattacgtgcaaatggccatcatcaagatgggggcgcttactggcacctatgtttataaccatctcactcctcttcggactgggcgcacaacggcctacgagatctggccgtggctgtagagccagtcgtcttctcccagatggagaccaagctcatcacgtggggggcggacaccgccgcgtgcggtgacatcatcaacggcttcccgtctctgcccgtaggggccgagagatactgctcggaccggccgatggaatggtctccaaggggtggaggttgctggcgcccatcacggcgtatgcccagcagacaaggggcctcttgggatgcataataaccagcctgccggccgggacaaaaaccaggtggagggtgaggttcagattgtgtcaactgctgcccagacctttctggcaacctgcatcaacggggtgtgctggactgtctaccacggggccggaacaaggaccatgcatcacccaaaggtcctgttatccagatgtacaccaatgtagaccaagacctcgtaggctggcccgctccccaaggtgcccgctcattgacaccctgcacttgcggctcctcggacctttacctggtcacgaggcacgccatgtcattcccgtacgccgacggggtgatagcaggggcagcctgctttcgccccggcctatctcttacttgaaaggctcctcggggggtccactactgtgccccgcgggacacgccgtaggcatattagggccgcggtgtgcacccgtggagtggctaaggcggtggactttatccccgtagagagcctagagacaaccatgaggtccccggtgttcacagacaattcctccccaccagcagtgccccagagcttccaggtggctcactgcatgctcccaccggcagcggtaagagcaccaaggtcccggccgcatacgcggctcaggggtacaaggtgttggtgctcaacccctccgttgctgcaacactgggttttggtgcctacatgtccaagcccatggggttgatcctaacatcaggactggggtgaggacaattactactggcagctccatcacgtactccacctacggcaagttcctcgccgacggcgggtgctcggggggtgcttatgacataataatttgtgacgaggccactccacggatgcaacatctatcttgggcatcggcaccgtccttgaccaagcagagactgcgggggcgagactggttgtgctcgccaccgctactcctccgggctccgtcaccgtgccccatccaacatcgaggaggttgctctgtctaccaccggagagatccccttttacggcaaggctatcccccttgaggcaatcaagggagggagacatctcattttctgccactcaaagaagaagtgcgacgagctcgccgcaaaactgtcgcgatgggcatcaatgccgtggcttactaccgcggccttgacgtgtccgtcatcccgaccagtggcgacgttgtcgttgtggcaactgatgctctcatgaccggctataccggcgacttcgactcgtgatagactgcaacacgtgtgtcacccagacagtcgacttcagccttgaccctaccttcaccattgagacaaccacacttcctcaggacgctgtctcccgcacccaacgtcggggcaggactggcagggggaagccaggctctacagatttgtggcaccgggagagcgcccttccggcatgttcgactcgtccgtcctctgtgagtgctatgacgcaggctgtgcttggtatgagctcacacccgccgagaccacagtcaggctacggcatacatgaacactccggggcttcccgtgtgccaagaccatcttgaattttgggagggcgtcttcacgggtctcacccatatagacgcccacttcctatctcagacaaagcagagtggggaaaactttccttacctggtacgtaccaagccaccgtgtgcgctagagctcaagctccccccccatcgtgggaccagatgtggaagtgcttgatccgcctcaaacccaccctccatgggccaacacctctgctatacaggctgggcgcgttcagaatgaagtcaccctgacgcacccaatcaccaagtacatcatgacatgcatgtcggct

SEQ ID NO: 527 - DNA, 4873 bp, Hepatitis C virus; identical to SEQ ID NO: 524

SEQ ID NO: 528 - DNA, 4873 bp, Hepatitis C virus
caaccgtcgcccacaggacgttaagttcccgggtggcggtcagatcgttggtggagtttacttgttgccgcgcaggggccctagattgggtgtgcgcgcgacgaggaagacttccgagcggtcgcaactcgcggtagacgtcagcctatccccaaggcgcgtcggcccgagggcaggacctgggctcagcccgggtacccctggcccctctacggcaatgagggctgcgggtgggcgggatggctcctgtcccccgtggctctcggcctagctggggccccacagacccccggcgtaggtcgcgcaatttgggtaaggtcatcgacaccctcacgtgcggcttcgccgacctcatggggtacattccgctcgtcggcgcccctcttgggggcgctccagggccctggcgcatggcgtccgggtcctggaagacggcgtgaattatgcaacagggaaccttcctggttgctctttttctatcttccttctggccctgctctcttgcctgaccgtgcccgcgtcgcctatcaagtacgcaactcctcgggcctctaccatgtcaccaatgattgccctaactcgagtattgtgtacgagacggccgataccattctacattctccggggtgtgtcccttgcgttcgcgagggtaacgcctcgaaagttgggtggcggtggcccccacagtcgccaccagggatggcagactccccacaacgcagcttcgacgtcacatcgatctgcttgtcgggagcgccaccctctgctcggccctctatgtgggggactttgcgggtctgtcttccttgtcggtcaactgttcactttctcccccaggcgccactggacaacgcaagactgcaactgttctatctaccccggccatataacgggtcaccgcatggcatgggatatgatgatgaactggtccctacagcagcgctggtagtagctcagctgctcagggtcccgcaagccatcttggacatgatcgctggtgcccactggggagtcctagcgggcatagcgtatttctccatggtggggaactgggcgaagtcttagtggtgctgttgctgtttgccggcgttgatgcgggaacccacatcaccggggggagtgtcgctcattccacggcacgactcaccggtcttttcagtcgtggctcccagcagcatatccagctgatcaacaccaacgcagttggcacatcaaccgcacggccctgaactgtaatgaaagcctcaacactggctggctagcggggctcttctattccaacaaattcaactcttcaggctgccccgagaggttggccagctgtagccccttgccgatttcgaccagggctggggtcctatcagctacgccaacggaagcggccccgaccaccggccctactgctggcactaccccccaaagccttgtggtatcgtgccagcacagagcgtatgtggcccagtgtatgcttcacacccagccccgtggtggtgggaacgaccaacaagttgggcgcgcctacctacaactggggttgcaatgatacggacgtcttcgtccttaataacaccaggccgccgttgggcaattggttggttgcacctggatgaactcatctggatttaccaaagtgtgcggagcgcctccttgtgtcatcggaggggggggcaacaacaccttgcactgccccactgactgtttccgcaagcatccggaagccacatactctcggtgtgctccggtccctggatcacgcccaggtgcctggtccactatccttataggctttggcattatccttgtactgtcaactacaccatgctcaaagtcaggatgtacgtgggaggggtcgagcacaggctgacgttgcttgcaactggacgcggggcgagcgttgcgatctggacgacagggacaggtccgagctcagcccgctgctgctgtccaccacacagtggcaggtccttccgtgttcctttaccaccttgccagccttgactaccgcctcatccacctccaccagaacatcgtggatgtgcaatacttgtacggggtggggtcaagcattgtgtcctgggccatcaagtgggaatacgtcatcctcttatttctcctgcttgcagacgcgcgatctgctcctgcttgtggatgatgctactcatatcccaagcggaggcagcgttggagaaccttgtgttgctcaacgcggcgtctctggccgggacgcatggccttgcgtccttcctcgtgtttttctgctttgcatggtattgaagggtaagtgggcgcccggagcagcctacgccttctacgggatgtggcctctcctcctgctcctgttggcgttgccccagcgggcatacgcgctggacacggagatggccgcgtcgtgtggcgggttgttattgtcgggttaatggcgctgactctgtcaccgcactacaagcgctacatcagctggtgcttatggtggcttcagtatttcttgaccagagtagaagcgcaactgcacgtgtgggttccccccctcaacgtccgggggggcgtgacgctgtcatcctactcatgtgtgctgtacgcccggctttggtatttgacatcaccaagctgctgttggccgtcttcggccctctttggattcttcaaaccagtctgctcaaagtgcctatttcgtgcgcgttcaaggccttctccggatctgcgcgctagcgcgcaagatggccggcggccattacgtgcaaatggccatcatcaagatgggggcgcttactggcacctatgtttataaccatctcactcctcttcggactgggcgcacaacggcctacgagatctggccgtggctgtagagccagtcgtcttctcccagatggagaccaagctcatcacgtggggggcggacaccgccgcgtgcggtgacatcatcaacggcttcccgtctctgcccgtaggggccgagagatactgctcggaccggccgatggaatggtctccaaggggtggaggttgctggcgcccatcacggcgtatgcccagcagacaaggggcctcttgggatgcataataaccagcctgccggccgggacaaaaaccaggtggagggtgaggttcagattgtgtcaactgctgcccagacctttctggcaacctgcatcaacggggtgtgctggactgtctaccacggggccggaacaaggaccatgcatcacccaaaggtcctgttatccagatgtacaccaatgtagaccaagacctcgtaggctggcccgctccccaaggtgcccgctcattgacaccctgcacttgcggctcctcggacctttacctggtcacgaggcacgccatgtcattcccgtacgccgacggggtgatagcaggggcagcctgctttcgccccggcctatctcttacttgaaaggctcctcggggggtccactactgtgccccgcgggacacgccgtaggcatattagggccgcggtgtgcacccgtggagtggctaaggcggtggactttatccccgtagagagcctagagacaaccatgaggtccccggtgttcacagacaattcctccccaccagcagtgccccagagcttccaggtggctcactgcatgctcccaccggcagcggtaagagcaccaaggtcccggccgcatacgcggctcaggggtacaaggtgttggtgctcaacccctccgttgctgcaacactgggttttggtgcctacatgtccaagcccatggggttgatcctaacatcaggactggggtgaggacaattactactggcagctccatcacgtactccacctacggcaagttcctcgccgacggcgggtgctcggggggtgcttatgacataataatttgtgacgaggccactccacggatgcaacatctatcttgggcatcggcaccgtccttgaccaagcagagactgcgggggcgagactggttgtgctcgccaccgctactcctccgggctccgtcaccgtgccccatccaacatcgaggaggttgctctgtctaccaccggagagatccccttttacggcaaggctatcccccttgaggcaatcaagggagggagacatctcattttctgccactcaaagaagaagtgcgacgagctcgccgcaaaactgtcgcgatgggcatcaatgccgtggcttactaccgcggccttgacgtgtccgtcatcccgaccagtggcgacgttgtcgttgtggcaactgatgctctcatgaccggctataccggcgacttcgactcgtgatagactgcaacacgtgtgtcacccagacagtcgacttcagccttgaccctaccttcaccattgagacaaccacacttccccaggacgctgtctcccgcacccaacgtcggggcaggactggcagggggaagccaggctctacagatttgtggcaccgggagagcgcccttccggcatgttcgactcgtccgtcctctgtgagtgctatgacgcaggctgtgcttggtatgagctcacacccgccgagaccacagtcaggctacggcatacatgaacactccggggcttcccgtgtgccaagaccatcttgaattttgggagggcgtcttcacgggtctcacccatatagacgcccacttcctatctcagacaaagcagagtggggaaaactttccttacctggtacgtaccaagccaccgtgtgcgctagagctcaagctccccccccatcgtgggaccagatgtggaagtgcttgatccgcctcaaacccaccctccatgggccaacacctctgctatacaggctgggcgcgttcagaatgaagtcaccctgacgcacccaatcaccaagtacatcatgacatgcatgtcggct

SEQ ID NO: 529 - DNA, 4873 bp, Hepatitis C virus; identical to SEQ ID NO: 524

SEQ ID NO: 530 - DNA, 4873 bp, Hepatitis C virus
caaccgtcgcccacaggacgttaagttcccgggtggcggtcagatcgttggtggagtttacttgttgccgcgcaggggccctagattgggtgtgcgcgcgacgaggaagacttccgagcggtcgcaactcgcggtagacgtcagcctatccccaaggcgcgtcggcccgagggcaggacctgggctcagcccgggtacccctggcccctctacggcaatgagggctgcgggtgggcgggatggctcctgtcccccgtggctctcggcctagctggggccccacagacccccggcgtaggtcgcgcaatttgggtaaggtcatcgacaccctcacgtgcggcttcgccgacctcatggggtacattccgctcgtcggcgcccctcttgggggcgctccagggccctggcgcatggcgtccgggtcctggaagacggcgtgaattatgcaacagggaaccttcctggttgctctttttctatcttccttctggccctgctctcttgcctgaccgtgcccgcgtcgcctatcaagtacgcaactcctcgggcctctaccatgtcaccaatgattgccctaactcgagtattgtgtacgagacggccgataccattctacattctccggggtgtgtcccttgcgttcgcgagggtaacgcctcgaaagttgggtggcggtggcccccacagtcgccaccagggatggcagactccccacaacgcagcttcgacgtcacatcgatctgcttgtcgggagcgccaccctctgctcggccctctatgtgggggactttgcgggtctgtcttccttgtcggtcaactgttcactttctcccccaggcgccactggacaacgcaagactgcaactgttctatctaccccggccatataacgggtcaccgcatggcatgggatatgatgatgaactggtccctacagcagcgctggtagtagctcagctgctcagggtcccgcaagccatcttggacatgatcgctggtgcccactggggagtcctagcgggcatagcgtatttctccatggtggggaactgggcgaagtcttagtggtgctgttgctgtttgccggcgttgatgcgggaacccacatcaccggggggagtgtcgctcattccacggcacgactcaccggtcttttcagtcgtggctcccagcagcatatccagctgatcaacaccaacgcagttggcacatcaatcgcacggccctgaactgtaatgaaagcctcaacactggctggctagcggggctcttctattccaacaaattcaactcttcaggctgtcccgagaggttggccagctgtagccccttgccgatttcgaccagggctggggtcctatcagctacgccaacggaagcggccccgaccaccggccctactgctggcactaccccccaaagccttgtggtatcgtgccagcacagagcgtatgtggcccagtgtatgcttcacacccagccccgtggtggtgggaacgaccaacaagttgggcgcgcctacctacaactggggttgcaatgatacggacgtcttcgtccttaataacaccaggccgccgttgggcaattggttggttgcacctggatgaactcatctggatttaccaaagtgtgcggagcgcctccttgtgtcatcggaggggggggcaacaacaccttgcactgccccactgactgtttccgcaagcatccggaagccacatactctcggtgtgctccggtccctggatcacgcccaggtgcctggtccactatccttataggctttggcattatccttgtactgtcaactacaccatgttcaaagtcaggatgtacgtgggaggggtcgagcacaggctgacgttgcttgcaactggacgcggggcgagcgttgcgatctggacgacagggacaggtccgagctcagcccgctgctgctgtccaccacacagtggcaggtccttccgtgttcctttaccaccttgccagccttgactaccgcctcatccacctccaccagaacatcgtggatgtgcaatacttgtacggggtggggtcaagcattgtgtcctgggccatcaagtgggaatacgtcatcctcttatttctcctgcttgcagacgcgcgatctgctcctgcttgtggatgatgctactcatatcccaagcggaggcagcgttggagaaccttgtgttgctcaacgcggcgtctctggccgggacgcatggccttgcgtccttcctcgtgtttttctgctttgcatggtattgaagggtaagtgggcgcccggagcagcctacgccttctacgggatgtggcctctcctcctgctcctgttggcgttgccccagcgggcatacgcgctggacacggagatggccgcgtcgtgtggcgggttgttattgtcgggttaatggcgctgactctgtcaccgcactacaagcgctacatcagctggtgcttatggtggcttcagtatttcttgaccagagtagaagcgcaactgcacgtgtgggttccccccctcaacgtccgggggggcgtgacgctgtcatcctactcatgtgtgctgtacacccggctttggtatttgacatcaccaagctgctgttggccgtcttcggccctctttggattcttcaaaccagtctgctcaaagtgcctatttcgtgcgcgttcaaggccttctccggatctgcgcgctagcgcgcaagatggccggcggccattacgtgcaaatggccatcatcaagatgggggcgcttactggcacctatgtttataaccatctcactcctcttcggactgggcgcacaacggcctacgagatctggccgtggctgtagagccagtcgtcttctcccagatggagaccaagctcatcacgtggggggcggacaccgccgcgtgcggtgacatcatcaacggcttcccgtctctgcccgtaggggccgagagatactgctcggaccggccgatggaatggtctccaaggggtggaggttgctggcgcccatcacggcgtatgcccagcagacaaggggcctcttgggatgcataataaccagcctgccggccgggacaaaaaccaggtggagggtgaggttcagattgtgtcaactgctgcccagacctttctggcaacctgcatcaacggggtgtgctggactgtctaccacggggccggaacaaggaccatgcatcacccaaaggtcctgttatccagatgtacaccaatgtagaccaagacctcgtaggctggcccgctccccaaggtgcccgctcattgacaccctgcacttgcggctcctcggacctttacctggtcacgaggcacgccatgtcattcccgtacgccgacggggtgatagcaggggcagcctgctttcgccccggcctatctcttacttgaaaggctcctcggggggtccactactgtgccccgcgggacacgccgtaggcatattagggccgcggtgtgcacccgtggagtggctaaggcggtggactttatccccgtagagagcctagagacaaccatgaggtccccggtgttcacagacaattcctccccaccagcagtgccccagagcttccaggtggctcactgcatgctcccaccggcagcggtaagagcaccaaggtcccggccgcatacgcggctcaggggtacaaggtgttggtgctcaacccctccgttgctgcaacactgggttttggtgcctacatgtccaagcccatggggttgatcctaacatcaggactggggtgaggacaattactactggcagctccatcacgtactccacctacggcaagttcctcgccgacggcgggtgctcggggggtgcttatgacataataatttgtgacgaggccactccacggatgcaacatctatcttgggcatcggcaccgtccttgaccaagcagagactgcgggggcgagactggttgtgctcgccaccgctactcctccgggctccgtcaccgtgccccatccaacatcgaggaggttgctctgtctaccaccggagagatccccttttacggcaaggctatcccccttgaggcaatcaagggagggagacatctcattttctgccactcaaagaagaagtgcgacgagctcgccgcaaaactgtcgcgatgggcatcaatgccgtggcttactaccgcggccttgacgtgtccgtcatcccgaccagtggcgacgttgtcgttgtggcaactgatgctctcatgaccggctataccggcgacttcgactcgtgatagactgcaacacgtgtgtcacccagacagtcgacttcagccttgaccctaccttcaccattgagacaaccacacttcctcaggacgctgtctcccgcacccaacgtcggggcaggactggcagggggaagccaggctctacagatttgtggcaccgggagagcgcccttccggcatgttcgactcgtccgtcctctgtgagtgctatgacgcaggctgtgcttggtatgagctcacacccgccgagaccacagtcaggctacggcatacatgaacactccggggcttcccgtgtgccaagaccatcttgaattttgggagggcgtcttcacgggtctcacccatatagacgcccacttcctatctcagacaaagcagagtggggaaaactttccttacctggtacgtaccaagccaccgtgtgcgctagagctcaagctccccccccatcgtgggaccagatgtggaagtgcttgatccgcctcaaacccaccctccatgggccaacacctctgctatacaggctgggcgcgttcagaatgaagtcaccctgacgcacccaatcaccaagtacatcatgacatgcatgtcggct

SEQ ID NO: 531 - DNA, 4872 bp, Hepatitis C virus
caaccgtcgcccacaggacgttaagttcccgggtggcggtcagatcgttggtggagtttacttgttgccgcgcaggggccctagattgggtgtgcgcgcgacgaggaagacttccgagcggtcgcaactcgcggtagacgtcagcctatccccaaggcgcgtcggcccgagggcaggacctgggctcagcccgggtacccctggcccctctacggcaatgagggctgcgggtgggcgggatggctcctgtcccccgtggctctcggcctagctggggccccacagacccccggcgtaggtcgcgcaatttgggtaaggtcatcgacaccctcacgtgcggcttcgccgacctcatggggtacattccgctcgtcggcgcccctcttgggggcgctccagggccctggcgcatggcgtccgggtcctggaagacggcgtgaattatgcaacagggaaccttcctggttgctctttttctatcttccttctggccctgctctcttgcctgaccgtgcccgcgtcgcctatcaagtacgcaactcctcgggcctctaccatgtcaccaatgattgccctaactcgagtattgtgtacgagacggccgataccattctacattctccggggtgtgtcccttgcgttcgcgagggtaacgcctcgaaagttgggtggcggtggcccccacagtcgccaccagggatggcagactccccacaacgcagcttcgacgtcacatcgatctgcttgtcgggagcgccaccctctgctcggccctctatgtgggggactttgcgggtctgtcttccttgtcggtcaactgttcactttctcccccaggcgccactggacaacgcaagactgcaactgttctatctaccccggccatataacgggtcaccgcatggcatgggatatgatgatgaactggtccctacagcagcgctggtagtagctcagctgctcagggtcccgcaagccatcttggacatgatcgctggtgcccactggggagtcctagcgggcatagcgtatttctccatggtggggaactgggcgaagtcttagtggtgctgttgctgtttgccggcgttgatgcgggaacccacatcaccggggggagtgtcgctcattccacggcacgactcaccggtcttttcagtcgtggctcccagcagcatatccagctgatcaacaccaacgcagttggcacatcaatcgcacggccctgaactgtaatgaaagcctcaacactggctggctagcggggctcttctattccaacaaattcaactcttcaggctgccccgagaggttggccagctgtagccccttgccgatttcgaccagggctggggtcctatcagctacgccaacggaagcggccccgaccaccggccctactgctggcactaccccccaaagccttgtggtatcgtgccagcacagagcgtatgtggcccagtgtatgcttcacacccagccccgtggtggtgggaacgaccaacaagttgggcgcgcctacctacaactggggttgcaatgatacggacgtcttcgtccttaataacaccaggccgccgttgggcaattggttggttgcacctggatgaactcatctggatttaccaaagtgtgcggagcgcctccttgtgtcatcggaggggggggcaacaacaccttgcactgccccactgactgtttccgcaagcatccggaagccacatactctcggtgtgctccggtccctggatcacgcccaggtgcctggtccactatccttataggctttggcattatccttgtactgtcaactacaccatgttcaaagtcaggatgtacgtgggaggggtcgagcacaggctgacgttgcttgcaactggacgcggggcgagcgttgcgatctggacgacagggacaggtccgagctcagcccgctgctgctgtccaccacacagtggcaggtccttccgtgttcctttaccaccttgccagccttgactaccgcctcatccacctccaccagaacatcgtggatgtgcaatacttgtacggggtggggtcaagcattgtgtcctgggccatcaagtgggaatacgtcatcctcttatttctcctgcttgcagacgcgcgatctgctcctgcttgtggatgatgctactcatatcccaagcggaggcagcgttggagaaccttgtgttgctcaacgcggcgtctctggccgggacgcatggccttgcgtccttcctcgtgtttttctgctttgcatggtattgaagggtaagtgggcgcccggagcagcctacgccttctacgggatgtggcctctcctcctgctcctgttggcgttgccccagcgggcatacgcgctggacacggagatggccgcgtcgtgtggcgggttgttattgtcgggttaatggcgctgactctgtcaccgcactacaagcgctacatcagctggtgcttatggtggcttcagtatttcttgaccagagtagaagcgcaactgcacgtgtgggttccccccctcaacgtccgggggggcgtgacgctgtcatcctactcatgtgtgctgtacacccggctttggtatttgacatcaccaagctgctgttggccgtcttcggccctctttggattcttcaaaccagtctgctcaaagtgcctatttcgtgcgcgttcaaggccttctccggatctgcgcgctagcgcgcaagatggccggcggccattacgtgcaaatggccatcatcaagatgggggcgcttactggcacctatgtttataaccatctcactcctcttcggactgggcgcacaacggcctacgagatctggccgtggctgtagagccagtcgtcttctcccagatggagaccaagctcatcacgtggggggcggacaccgccgcgtgcggtgacatcatcaacggcttcccgtctctgcccgtaggggccgagagatactgctcggaccggccgatggaatggtctccaaggggtggaggttgctggcgcccatccggcgtatgcccagcagacaaggggcctcttgggatgcataataaccagcctgacggccgggacaaaaaccaggtggagggtgaggttcagattgtgtcaactgctgcccagacctttctggcaacctgcatcaacggggtgtgctggactgtctaccacggggccggaacaaggaccatccatcacccaaaggtcctgttatccagatgtacaccaatgtagaccaagacctcgtaggctggcccgctccccaaggtgcccgctcattgacaccctgcacttgcggctcctcggacctttacctggtcacgaggcacgccgtgtcattcccgtacgccgacggggtgatagcaggggcagcctgctttcgccccggcctatctcttacttgaaaggctcctcggggggtccactactgtgccccgcgggacacgccgtaggcatattcgggccgcggtgtgcacccgtggagtggctaaggcggtggactttatccccgtagagagcctagagacaaccatgaggtccccggtgttcacagacaattcctccccaccagcagtgccccagagcttccaggtggctcaccgcatgctcccaccggcagcggtaagagcaccaaggtcccggccgcatacgcggctcaggggtacaaggtgttggtgctcaacccctccgttgctgcaacactgggttttggtgcctacatgtccaagcccatggggttgatcctaacatcaggactggggtgaggacaattactactggcagctccatcacgtactccacctacggcaagttcctcgccgacggcgggtgctcggggggtgcttatgacataataatttgtgacgagtccactccacggatgcaacatctatcttgggcatcggcaccgtccttgaccaagcagagactgcgggggcgagactggttgtgctcgccaccgctactcctccgggctccgtcaccgtgccccatcctacatcgaggaggttgctctgtctaccaccggagagatccccttttacggcaaggctatcccccttgaggcaatcaagggagggagacatctcattttctgccactcaaagaagaagtgcgacgagctcgccgcaaaactggcgcgatgggcatcaatgccgtggcttactaccgcggccttgacgtgtccgtcatcccgaccagtggcgacgttgtcgttgtggcaactgatgctctcatgaccggctataccggcgacttcgactcgtgatagactgcaacacgtgtgtcacccagacagtcgacttcagccttgaccctaccttcaccattgagacaaccacacttcctcaggacgctgtctcccgcacccaacgtcggggcaggactggcagggggaagccaggcactacagatttgtggcaccgggagagcgcccttccggcatgttcgactcgtccgtcctctgtgagtgctatgacgcaggctgtgcttggtatgagctcacacccgccgagaccacagtcaggctacgacatacatgaacactccggggcttcccgtgtgccaagaccatcttgaattttgggagggcgtcttcacgggtctcacccatatagacgcccacttcctatctcagacaaagcagagtggggaaaactttccttacctggtaggtaccaagccaccgtgtgcgctagagctcaagctccccccccatcgtgggaccagatgtggaagtgcttgatccgcctcaaacccaccctccatgggccaacacctctgctatacaggctgggcgcgttcagaatgaagtcaccctgacgcacccaatcaccaagtacatcatgacatgcatgtcggct

SEQ ID NO: 532 - DNA, 4873 bp, Hepatitis C virus; identical to SEQ ID NO: 524

SEQ ID NO: 533 - DNA, 4873 bp, Hepatitis C virus
caaccgtcgcccacaggacgttaagttcccgggtggcggtcagatcgttggtggagtttacttgttgccgcgcaggggccctagattgggtgtgcgcgcgacgaggaagacttccgagcggtcgcaactcgcggtagacgtcagcctatccccaaggcgcgtcggcccgagggcaggacctgggctcagcccgggtacccctggcccctctacggcaatgagggctgcgggtgggcgggatggctcctgtcccccgtggctctcggcctagctggggccccacagacccccggcgtaggtcgcgcaatttgggtaaggtcatcgacaccctcacgtgcggcttcgccgacctcatggggtacattccgctcgtcggcgcccctcttgggggcgctccagggccctggcgcatggcgtccgggtcctggaagacggcgtgaattatgcaacagggaaccttcctggttgctctttttctatcttccttctggccctgctctcttgcctgaccgtgcccgcgtcgcctatcaagtacgcaactcctcgggcctctaccatgtcaccaatgattgccctaactcgagtattgtgtacgagacggccgataccattctacattctccggggtgtgtcccttgcgttcgcgagggtaacgcctcgaaagttgggtggcggtggcccccacagtcgccaccagggatggcagactccccacaacgcagcttcgacgtcacatcgatctgcttgtcgggagcgccaccctctgctcggccctctatgtgggggactttgcgggtctgtcttccttgtcggtcaactgttcactttctcccccaggcgccactggacaacgcaagactgcaactgttctatctaccccggccatataacgggtcaccgcatggcatgggatatgatgatgaactggtccctacagcagcgctggtagtagctcagctgctcagggtcccgcaagccatcttggacatgatcgctggtgcccactggggagtcctagcgggcatagcgtatttctccatggtggggaactgggcgaagtcttagtggtgctgttgctgtttgccggcgttgatgcgggaacccacatcaccggggggagtgtcgctcattccacggtacgactcaccggtcttttcagtcgtggctcccagcagcatatccagctgatcaacaccaacgcagttggcacatcaatcgcacggccctgaactgtaatgaaagcctcaacactggctggctagcggggctcttctattccaacaaattcaactcttcaggctgccccgagaggttggccagctgtagccccttgccgatttcgaccagggctggggtcctatcagctacgccaacggaagcggccccgaccaccggccctactgctggcactaccccccaaagccttgtggtatcgtgccagcacagagcgtatgtggcccagtgtatgcttcacacccagccccgtggtggtgggaacgaccaacaagttgggcgcgcctacctacaactggggttgcaatgatacggacgtcttcgtccttaataacaccaggccgccgttgggcaattggttggttgcacctggatgaactcatctggatttaccaaagtgtgcggagcgcctccttgtgtcatcggaggggggggcaacaacaccttgcactgccccactgactgtttccgcaagcatccggaagccacatactctcggtgtgctccggtccctggatcacgcccaggtgcctggtccactatccttataggctttggcattatccttgtactgtcaactacaccatgttcaaagtcaggatgtacgtgggaggggtcgagcacaggctgacgttgcttgcaactggacgcggggcgagcgttgcgatctggacgacagggacaggtccgagctcagcccgctgctgctgtccaccacacagtggcaggtccttccgtgttcctttaccaccttgccagccttgactaccgcctcatccacctccaccagaacatcgtggatgtgcaatacttgtacggggtggggtcaagcattgtgtcctgggccatcaagtgggaatacgtcatcctcttatttctcctgcttgcagacgcgcgatctgctcctgcttgtggatgatgctactcatatcccaagcggaggcagcgttggagaaccttgtgttgctcaacgcggcgtctctggccgggacgcatggccttgcgtccttcctcgtgtttttctgctttgcatggtattgaagggtaagtgggcgcccggagcagcctacgccttctacgggatgtggcctctcctcctgctcctgttggcgttgccccagcgggcatacgcgctggacacggagatggccgcgtcgtgtggcgggttgttattgtcgggttaatggcgctgactctgtcaccgcactacaagcgctacatcagctggtgcttatggtggcttcagtatttcttgaccagagtagaagcgcaactgcacgtgtgggttccccccctcaacgtccgggggggcgtgacgctgtcatcctactcatgtgtgctgtacacccggctttggtatttgacatcaccaagctgctgttggccgtcttcggccctctttggattcttcaaaccagtctgctcaaagtgcctatttcgtgcgcgttcaaggccttctccggatctgcgcgctagcgcgcaagatggccggcggccattacgtgcaaatggccatcatcaagatgggggcgcttactggcacctatgtttataaccatctcactcctcttcggactgggcgcacaacggcctacgagatctggccgtggctgtagagccagtcgtcttctcccagatggagaccaagctcatcacgtggggggcggacaccgccgcgtgcggtgacatcatcaacggcttcccgtctctgcccgtaggggccgagagatactgctcggaccggccgatggaatggtctccaaggggtggaggttgctggcgcccatcacggcgtatgcccagcagacaaggggcctcttgggatgcataataaccagcctgccggccgggacaaaaaccaggtggagggtgaggttcagattgtgtcaactgctgcccagacctttctggcaacctgcatcaacggggtgtgctggactgtctaccacggggccggaacaaggaccatgcatcacccaaaggtcctgttatccagatgtacaccaatgtagaccaagacctcgtaggctggcccgctccccaaggtgcccgctcattgacaccctgcacttgcggctcctcggacctttacctggtcacgaggcacgccatgtcattcccgtacgccgacggggtgatagcaggggcagcctgctttcgccccggcctatctcttacttgaaaggctcctcggggggtccactactgtgccccgcgggacacgccgtaggcatattagggccgcggtgtgcacccgtggagtggctaaggcggtggactttatccccgtagagagcctagagacaaccatgaggtccccggtgttcacagacaattcctccccaccagcagtgccccagagcttccaggtggctcactgcatgctcccaccggcagcggtaagagcaccaaggtcccggccgcatacgcggctcaggggtacaaggtgttggtgctcaacccctccgttgctgcaacactgggttttggtgcctacatgtccaagcccatggggttgatcctaacatcaggactggggtgaggacaattactactggcagctccatcacgtactccacctacggcaagttcctcgccgacggcgggtgctcggggggtgcttatgacataataatttgtgacgaggccactccacggatgcaacatctatcttgggcattggcaccgtccttgaccaagcagagactgcgggggcgagactggttgtgctcgccaccgctactcctccgggctccgtcaccgtgccccatccaacatcgaggaggttgctctgtctaccaccggagagatccccttttacggcaaggctatcccccttgaggcaatcaagggagggagacatctcattttctgccactcaaagaagaagtgcgacgagctcgccgcaaaactgtcgcgatgggcatcaatgccgtggcttactaccgcggccttgacgtgtccgtcatcccgaccagtggcgacgttgtcgttgtggcaactgatgctctcatgaccggctataccggcgacttcgactcgtgatagactgcaacacgtgtgtcacccagacagtcgacttcagccttgaccctaccttcaccattgagacaaccacacttcctcaggacgctgtctcccgcacccaacgtcggggcaggactggcagggggaagccaggctctacagatttgtgacaccgggagagcgcccttccggcatgttcgactcgtccgtcctctgtgagtgctatgacgcaggctgtgcttggtatgagctcacacccgccgagaccacagtcaggctacggcatacatgaacactccggggcttcccgtgtgccaagaccatcttgaattttgggagggcgtcttcacgggtctcacccatatagacgcccacttcctatctcagacaaagcagagtggggaaaactttccttacctggtacgtaccaagccaccgtgtgcgctagagctcaagctccccccccatcgtgggaccagatgtggaagtgcttgatccgcctcaaacccaccctccatgggccaacacctctgctatacaggctgggcgcgttcagaatgaagtcaccctgacgcacccaatcaccaagtacatcatgacatgcatgtcggct

SEQ ID NO: 534 - DNA, 4808 bp, Hepatitis C virus
caaccgtcgcccacaggacgttaagttcccgggtggcggtcagatcgttggtggagtttacttgttgccgcgcaggggccctagattgggtgtgcgcgcgacgaggaagacttccgagcggtcgcaactcgcggtagacgtcagcctatccccaaggcgcgtcggcccgagggcaggacctgggctcagcccgggtacccctggcccctctacggcaatgagggctgcgggtgggcgggatggctcctgtcccccgtggctctcggcctagctggggccccacagacccccggcgtaggtcgcgcaatttgggtaaggtcatcgacaccctcacgtgcggcttcgccgacctcatggggtacattccgctcgtcggcgcccctcttgggggcgctccagggccctggcgcatggcgtccgggtcctggaagacggcgtgaattatgcaacagggaaccttcctggttgctctttttctatcttccttctggccctgctctcttgcctgaccgtgcccgcgtcgcctatcaagtacgcaactcctcgggcctctaccatgtcaccaatgattgccctaactcgagtattgtgtacgagacggccgataccattctacattctccggggtgtgtcccttgcgttcgcgagggtaacgcctcgaaagttgggtggcggtggcccccacagtcgccaccctctgctcggccctctatgtgggggacttgtgcgggtctgtcttccttgtcggtcaactgttcactttctcccccaggcgccactggacaacgcagactgcaactgttctatctaccccggccatataacgggtcaccgcatggcatgggatatgatgatgaactggtcccctacagcagcgctggtagtagctcagctgctcagggtcccgcaagccatcttggacatgatcgctgtgcccactggggagtcctagcgggcatagcgtatttctccatggtggggaactgggcgaaggtcttagtggtgctgttgctgtttgccggcgttgatgcgggaacccacatcaccggggggagtgtgctcattccacggcacgactcaccggtcttttcagtcgtggctcccagcagcatatccagctgatcaacaccaacggcagttggcacatcaatcgcacggccctgaactgtaatgaaagcctcaacactggctggctagcgggctcttctattccaacaaattcaactcttcaggctgccccgagaggttggccagctgtagaccccttgccgatttcgaccagggctggggtcctatcagctacgccaacggaagcggccccgaccacggccctactgctggcactaccccccaaagccttgtggtatcgtgccagcacagagcgtatgtggcccagtgtattgcttcacacccagccccgtggtggtgggaacgaccaacaagttgggcgcgcctacctacaactgggttgcaatgatacggacgtcttcgtccttaataacaccaggccgccgttgggcaattggttcggttgcacctggatgaactcatctggatttaccaaagtgtgcggagcgcctccttgtgtcatcggggggggggcaacaacaccttgcactgccccactgactgtttccgcaagcatccggaagccacatactctcggtgtggctccggtccctggatcacgcccaggtgcctggtccactatccttataggctttggcattatcctgtactgtcaactacaccatgttcaaagtcaggatgtacgtgggaggggtcgagcacaggctggacgttgcttgcaactggacgcggggcgagcgttgcgatctggacgacagggacaggtccgagctagcccgctgctgctgtccaccacacagtggcaggtccttccgtgttcctttaccaccttgccagccttgactaccggcctcatccacctccaccagaacatcgtggatgtgcaatacttgtacggggtggggtcaagcatttgtcctgggccatcaagtgggaatacgtcatcctcttatttctcctgcttgcagacgcgcgcatctgctcctgcttgtggatgatgctactcatatcccaagcggaggcagcgttggagaaccttgtttgctcaacgcggcgtctctggccgggacgcatggccttgcgtccttcctcgtgtttttctgctttgcatggtatctgaagggtaagtgggcgcccggagcagcctacgccttctacgggatgtggcctctcctcctgctctgttggcgttgccccagcgggcatacgcgctggacacggagatggccgcgtcgtgtggcggcgttgttattgtcgggttaatggcgctgactctgtcaccgcactacaagcgctacatcagctggtgttatggtggcttcagtatttcttgaccagagtagaagcgcaactgcacgtgtgggttccccccctcaacgtccggggggggcgtgacgctgtcatcctactcatgtgtgctgtacacccggctttggtatttgacatcaccagctgctgttggccgtcttcggccctctttggattcttcaaaccagtctgctcaaagtgccctatttcgtgcgcgttcaaggccttctccggatctgcgcgctagcgcgcaagatggccggcggccatacgtgcaaatggccatcatcaagatgggggcgcttactggcacctatgtttataaccatctcactcctcttcgggactgggcgcacaacggcctacgagatctggccgtggctgtagagccagtcgtcttctcccagatgagaccaagctcatcacgtggggggcggacaccgccgcgtgcggtgacatcatcaacggcttgcccgtctctgcccgtaggggccgagagatactgctcggaccggccgatggaatggtctccaagggtggaggttgctggcgcccatcacggcgtatgcccagcagacaaggggcctcttgggatgcataataaccagcctgaccggccgggacaaaaaccaggtggagggtgaggttcagattgtgtcaactgctgcccagaccttttggcaacctgcatcaacggggtgtgctggactgtctaccacggggccggaacaaggaccatcgcatcacccaaaggtcctgttatccagatgtacaccaatgtagaccaagacctcgtaggctggccgctccccaaggtgcccgctcattgacaccctgcacttgcggctcctcggacctttacctggtcacgaggcacgccgatgtcattcccgtacgccgacggggtgatagcaggggcagcctgctttcgccccggcctatctctacttgaaaggctcctcggggggtccactactgtgccccgcgggacacgccgtaggcatattcagggccgcggtgtgcacccgtggagtggctaaggcggtggactttatccccgtagagagcctagaacaaccatgaggtccccggtgttcacagacaattcctccccaccagcagtgccccagagcttccaggtggctcacctgcatgctcccaccggcagcggtaagagcaccaaggtcccggccgcatacgcggctcaggggtacaggtgttggtgctcaacccctccgttgctgcaacactgggttttggtgcctacatgtccaaggcccatggggttgatcctaacatcaggactggggtgaggacaattactactggcagctccatcactactccacctacggcaagttcctcgccgacggcgggtgctcggggggtgcttatgacataataatttgtgacgagtgccactccacggatgcaacatctatcttgggcatcggcaccgtccttgaccaagcagagactgcggggcgagactggttgtgctcgccaccgctactcctccgggctccgtcaccgtgccccatcctaacatcgaggaggttgctctgtctaccaccggagagatccccttttacggcaaggctatccccctgaggcaatcaagggagggagacatctcattttctgccactcaaagaagaagtgcgacgagctcgccgcaaaactggtcgcgatgggcatcaatgccgtggcttactaccgcggccttgacgtgtccgtcatcccgaccagtgcgacgttgtcgttgtggcaactgatgctctcatgaccggctataccggcgacttcgactcggtgatagactgcaacacgtgtgtcacccagacagtcgacttcagccttgaccctaccttcaccatgagacaaccacacttcctcaggacgctgtctcccgcacccaacgtcggggcaggactggcagggggaagccaggcatctacagatttgtggcaccgggagagcgcccttccggcatgttcgactcgtccgtcctctgtgaggctatgacgcaggctgtgcttggtatgagctcacacccgccgagaccacagtcaggctacgagcatacatgaacactccggggcttcccgtgtgccaagaccatcttgaattttgggagggcgtcttacgggtctcacccatatagacgcccacttcctatctcagacaaagcagagtggggaaaactttccttacctggtagcgtaccaagccaccgtgtgcgctagagctcaagctccccccccatcgtgggaccagatgtggaaggcttgatccgcctcaaacccaccctccatgggccaacacctctgctatacaggctgggcgcggttcagaatgaagtcaccctgacgcacccaatcaccaagtacatcatgacatgcatgtcggct

SEQ ID NO: 535 - DNA, 4873 bp, Hepatitis C virus
caaccgtcgcccacaggacgttaagttcccgggtggcggtcagatcgttggtggagtttacttgttgccgcgcaggggccctagattgggtgtgcgcgcgacgaggaagacttccgagcggtcgcaactcgcggtagacgtcagcctatccccaaggcgcgtcggcccgagggcaggacctgggctcagcccgggtacccctggcccctctacggcaatgagggctgcgggtgggcgggatggctcctgtcccccgtggctctcggcctagctggggccccacagacccccggcgtaggtcgcgcaatttgggtaaggtcatcgacaccctcacgtgcggcttcgccgacctcatggggtacattccgctcgtcggcgcccctcttgggggcgctccagggccctggcgcatggcgtccgggtcctggaagacggcgtgaattatgcaacagggaaccttcctggttgctctttttctatcttccttctggccctgctctcttgcctgaccgtgcccgcgtcgcctatcaagtacgcaactcctcgggcctctaccatgtcaccaatgattgccctaactcgagtattgtgtacgagacggccgataccattctacattctccggggtgtgtcccttgcgttcgcgagggtaacgcctcgaaagttgggtggcggtggcccccacagtcgccaccagggatggcagactccccacaacgcagcttcgacgtcacatcgatctgcttgtcgggagcgccaccctctgctcggccctctatgtgggggactttgcgggtctgtcttccttgtcggtcaactgttcactttctcccccaggcgccactggacaacgcaagactgcaactgttctatctaccccggccatataacgggtcaccgcatggcatgggatatgatgatgaactggtccctacagcagcgctggtagtagctcagctgctcagggtcccgcaagccatcttggacatgatcgctggtgcccactggggagtcctagcgggcatagcgtatttctccatggtggggaactgggcgaagtcttagtggtgctgttgctgtttgccggcgttgatgcgggaacccacatcaccggggggagtgtcgctcattccacggcacgactcaccggtcttttcagtcgtggctcccagcagcatatccagctgatcaacaccaacgcagttggcacatcaatcgcacggccctgaactgtaatgaaagcctcaacactggctggctagcggggctcttctattccaacaaattcaactcttcaggctgccccgagaggttggccagctgtagccccttgccgatttcgaccagggctggggtcctatcagctacgccaacggaagcggccccgaccaccggccctactgctggcactaccccccaaagccttgtggtatcgtgccagcacagagcgtatgtggcccagtgtatgcttcacacccagccccgtggtggtgggaacgaccaacaagttgggcgcgcctacctacaactggggttgcaatgatacggacgtcttcgtccttaataacaccaggccgccgttgggcaattggttggttgcacctggatgaactcatctggatttaccaaagtgtgcggagcgcctccttgtgtcatcggaggggggggcaacaacaccttgcactgccccactgactgtttccgcaagcatccggaagccacatactctcggtgtgctccggtccctggatcacgcccaggtgcctggtccactatccttataggctttggcattatccttgtactgtcaactacaccatgttcaaagtcaggatgtacgtgggaggggtcgagcacaggctgacgttgcttgcaactggacgcggggcgagcgttgcgatctggacgacagggacaggtccgagctcagcccgctgctgctgtccaccacacagtggcaggtccttccgtgttcctttaccaccttgccagccttgactaccgcctcatccacctccaccagaacatcgtggatgtgcaatacttgtacggggtggggtcaagcattgtgtcctgggccatcaagtgggaatacgtcatcctcttatttctcctgcttgcagacgcgcgatctgctcctgcttgtggatgatgctactcatatcccaagcggaggcagcgttggagaaccttgtgttgctcaacgcggcgtctctggccgggacgcatggccttgcgtccttcctcgtgtttttctgctttgcatggtattgaagggtaagtgggcgcccggagcagcctacgccttctacgggatgtggcctctcctcctgctcctgttggcgttgccccagcgggcatacgcgctggacacggagatggccgcgtcgtgtggcgggttgttattgtcgggttaatggcgctgactctgtcaccgtactacaagcgctacatcagctggtgcttatggtggcttcagtatttcttgaccagagtagaagcgcaactgcacgtgtgggttccccccctcaacgtccgggggggcgtgacgctgtcatcctactcatgtgtgctgtacacccggctttggtatttgacatcaccaagctgctgttggccgtcttcggccctctttggattcttcaaaccagtctgctcaaagtgcctatttcgtgcgcgttcaaggccttctccggatctgcgcgctagcgcgcaagatggccggcggccattacgtgcaaatggccatcatcaagatgggggcgcttactggcacctatgtttataaccatctcactcctcttcggactgggcgcacaacggcctacgagatctggccgtggctgtagagccagtcgtcttctcccagatggagaccaagctcatcacgtggggggcggacaccgccgcgtgcggtgacatcatcaacggcttcccgtctctgcccgtaggggccgagagatactgctcggaccggccgatggaatggtctccaaggggtggaggttgctggcgcccatcacggcgtatgcccagcagacaaggggcctcttgggatgcataataaccagcctgccggccgggacaaaaaccaggtggagggtgaggttcagattgtgtcaactgctgcccagacctttctggcaacctgcatcaacggggtgtgctggactgtctaccacggggccggaacaaggaccatgcatcacccaaaggtcctgttatccagatgtacaccaatgtagaccaagacctcgtaggctggcccgctccccaaggtgcccgctcattgacaccctgcacttgcggctcctcggacctttacctggtcacgaggcacgccatgtcattcccgtacgccgacggggtgatagcaggggcagcctgctttcgccccggcctatctcttacttgaaaggctcctcggggggtccactactgtgccccgcgggacacgccgtaggcatattagggccgcggtgtgcacccgtggagtggctaaggcggtggactttatccccgtagagagcctagagacaaccatgaggtccccggtgttcacagacaattcctccccaccagcagtgccccagagcttccaggtggctcactgcatgctcccaccggcagcggtaagagcaccaaggtcccggccgcatacgcggctcaggggtacaaggtgttggtgctcaacccctccgttgctgcaacactgggttttggtgcctacatgtccaagcccatggggttgatcctaacatcaggactggggtgaggacaattactactggcagctccatcacgtactccacctacggcaagttcctcgccgacggcgggtgctcggggggtgcttatgacataataatttgtgacgaggccactccacggatgcaacatctatcttgggcatcggcaccgtccttgaccaagcagagactgcgggggcgagactggttgtgctcgccaccgctactcctccgggctccgtcaccgtgccccatccaacatcgaggaggttgctctgtctaccaccggagagatccccttttacggcaaggctatcccccttgaggcaatcaagggagggagacatctcattttctgccactcaaagaagaagtgcgacgagctcgccgcaaaactgtcgcgatgggcatcaatgccgtggcttactaccgcggccttgacgtgtccgtcatcccgaccagtggcgacgttgtcgttgtggcaactgatgctctcatgaccggctataccggcgacttcgactcgtgatagactgcaacacgtgtgtcacccagacagtcgacttcagccttgaccctaccttcaccattgagacaaccacacttcctcaggacgctgtctcccgcacccaacgtcggggcaggactggcagggggaagccaggctctacagatttgtggcaccgggagagcgcccttccggcatgttcgactcgtccgtcctctgtgagtgctatgacgcaggctgtgcttggtatgagctcacacccgccgagaccacagtcaggctacggcatacatgaacactccggggcttcccgtgtgccaagaccatcttgaattttgggagggcgtcttcacgggtctcacccatatagacgcccacttcctatctcagacaaagcagagtggggaaaactttccttacctggtacgtaccaagccaccgtgtgcgctagagctcaagctccccccccatcgtgggaccagatgtggaagtgcttgatccgcctcaaacccaccctccatgggccaacacctctgctatacaggctgggcgcgttcagaatgaagtcaccctgacgcacccaatcaccaagtacatcatgacatgcatgtcggct

SEQ ID NO: 536 - DNA, 4873 bp, Hepatitis C virus
caaccgtcgcccacaggacgttaagttcccgggtggcggtcagatcgttggtggagtttacttgttgccgcgcaggggccctagattgggtgtgcgcgcgacgaggaagacttccgagcggtcgcaactcgcggtagacgtcagcctatccccaaggcgcgtcggcccgagggcaggacctgggctcagcccgggtacccctggcccctctacggcaatgagggctgcgggtgggcgggatggctcctgtcccccgtggctctcggcctagctggggccccacagacccccggcgtaggtcgcgcaatttgggtaaggtcatcgacaccctcacgtgcggcttcgccgacctcatggggtacattccgctcgtcggcgcccctcttgggggcgctccagggccctggcgcatggcgtccgggtcctggaagacggcgtgaattatgcaacagggaaccttcctggttgctctttttctatcttccttctggccctgctctcttgcctgaccgtgcccgcgtcgcctatcaagtacgcaactcctcgggcctctaccatgtcaccaatgattgccctaactcgagtattgtgtacgagacggccgataccattctacattctccggggtgtgtcccttgcgttcgcgagggtaacgcctcgaaagttgggtggcggtggcccccacagtcgccaccagggatggcagactccccacaacgcagcttcgacgtcacatcgatctgcttgtcgggagcgccaccctctgctcggccctctatgtgggggactttgcgggtctgtcttccttgtcggtcaactgttcactttctcccccaggcgccactggacaacgcaagactgcaactgttctatctaccccggccatataacgggtcaccgcatggcatgggatatgatgatgaactggtccctacagcagcgctggtagtagctcagctgctcagggtcccgcaagccatcttggacatgatcgctggtgcccactggggagtcctagcgggcatagcgtatttctccatggtggggaactgggcgaagtcttagtggtgctgttgctgtttgccggcgttgatgcgggaacccacatcaccggggggagtgtcgctcattccacggcacgactcaccggtcttttcagtcgtggctcccagcagcatatccagctgatcaacaccaacgcagttggcacatcaatcgcacggccctgaactgtaatgaaagcctcaacactggctggctagcggggctcttctattccaacaaattcaactcttcaggctgccccgagaggttggccagctgtagccccttgccgatttcgaccagggctggggtcctatcagctacgccaacggaagcggccccgaccaccggccctactgctggcactaccccccaaagccttgtggtatcgtgccagcacagagcgtatgtggcccagtgtatgcttcacacccagccccgtggtggtgggaacgaccaacaagttgggcgcgcctacctacaactggggttgcaatgatacggacgtcttcgtccttaataacaccaggccgccgttgggcaattggttggttgcacctggatgaactcatctggatttaccaaagtgtgcggagcgcctccttgtgtcatcggaggggggggcaacaacaccttgcactgccccactgactgtttccgcaagcatccggaagccacatactctcggtgtgctccggtccctggatcacgcccaggtgcctggtccactatccttataggctttggcattatccttgtactgtcaactacaccatgttcaaagtcaggatgtacgtgggaggggtcgagcacaggctgacgttgcttgcaactggacgcggggcgagcgttgcgatctggacgacagggacaggtccgagctcagcccgctgctgctgtccaccacacagtggcaggtccttccgtgttcctttaccaccttgccagccttgactaccgcctcatccacctccaccagaacatcgtggatgtgcaatacttgtacggggtggggtcaagcattgtatcctgggccatcaagtgggaatacgtcatcctcttatttctcctgcttgcagacgcgcgatctgctcctgcttgtggatgatgctactcatatcccaagcggaggcagcgttggagaaccttgtgttgctcaacgcggcgtctctggccgggacgcatggccttgcgtccttcctcgtgtttttctgctttgcatggtattgaagggtaagtgggcgcccggagcagcctacgccttctacgggatgtggcctctcctcctgctcctgttggcgttgccccagcgggcatacgcgctggacacggagatggccgcgtcgtgtggcgggttgttattgtcgggttaatggcgctgactctgtcaccgcactacaagcgctacatcagctggtgcttatggtggcttcagtatttcttgaccagagtagaagcgcaactgcacgtgtgggttccccccctcaacgtccgggggggcgtgacgctgtcatcctactcatgtgtgctgtacacccggctttggtatttgacatcaccaagctgctgttggccgtcttcggccctctttggattcttcaaaccagtctgctcaaagtgcctatttcgtgcgcgttcaaggccttctccggatctgcgcgctagcgcgcaagatggccggcggccattacgtgcaaatggccatcatcaagatgggggcgcttactggcacctatgtttataaccatctcactcctcttcggactgggcgcacaacggcctacgagatctggccgtggctgtagagccagtcgtcttctcccagatggagaccaagctcatcacgtggggggcggacaccgccgcgtgcggtgacatcatcaacggcttcccgtctctgcccgtaggggccgagagatactgctcggaccggccgatggaatggtctccaaggggtggaggttgctggcgcccatcacggcgtatgcccagcagacaaggggcctcttgggatgcataataaccagcctgccggccgggacaaaaaccaggtggagggtgaggttcagattgtgtcaactgctgcccagacctttctggcaacctgcatcaacggggtgtgctggactgtctaccacggggccggaacaaggaccatgcatcacccaaaggtcctgttatccagatgtacaccaatgtagaccaagacctcgtaggctggcccgctccccaaggtgcccgctcattgacaccctgcacttgcggctcctcggacctttacctggtcacgaggcacgccatgtcattcccgtacgccgacggggtgatagcaggggcagcctgctttcgccccggcctatctcttacttgaaaggctcctcggggggtccactactgtgccccgcgggacacgccgtaggcatattagggccgcggtgtgcacccgtggagtggctaaggcggtggactttatccccgtagagagcctagagacaaccatgaggtccccggtgttcacagacaattcctccccaccagcagtgccccagagcttccaggtggctcactgcatgctcccaccggcagcggtaagagcaccaaggtcccggccgcatacgcggctcaggggtacaaggtgttggtgctcaacccctccgttgctgcaacactgggttttggtgcctacatgtccaagcccatggggttgatcctaacatcaggactggggtgaggacaattactactggcagctccatcacgtactccacctacggcaagttcctcgccgacggcgggtgctcggggggtgcttatgacataataatttgtgacgaggccactccacggatgcaacatctatcttgggcatcggcaccgtccttgaccaagcagagactgcgggggcgagactggttgtgctcgccaccgctactcctccgggctccgtcaccgtgccccatccaacatcgaggaggttgctctgtctaccaccggagagatccccttttacggcaaggctatcccccttgaggcaatcaagggagggagacatctcattttctgccactcaaagaagaagtgcgacgagctcgccgcaaaactgtcgcgatgggcatcaatgccgtggcttactaccgcggccttgacgtgtccgtcatcccgaccagtggcgacgttgtcgttgtggcaactgatgctctcatgaccggctataccggcgacttcgactcgtgatagactgcaacacgtgtgtcacccagacagtcgacttcagccttgaccctaccttcaccattgagacaaccacacttcctcaggacgctgtctcccgcacccaacgtcggggcaggactggcagggggaagccaggctctacagatttgtggcaccgggagagcgcccttccggcatgttcgactcgtccgtcctctgtgagtgctatgacgcaggctgtgcttggtatgagctcacacccgccgagaccacagtcaggctacggcatacatgaacactccggggcttcccgtgtgccaagaccatcttgaattttgggagggcgtcttcacgggtctcacccatatagacgcccacttcctatctcagacaaagcagagtggggaaacctttccttacctggtacgtaccaagccaccgtgtgcgctagagctcaagctccccccccatcgtgggaccagatgtggaagtgcttgatccgcctcaaacccaccctccatgggccaacacctctgctatacaggctgggcgcgttcagaatgaagtcaccctgacgcacccaatcaccaagtacatcatgacatgcatgtcggct

SEQ ID NO: 537 - DNA, 4871 bp, Hepatitis C virus
caaccgtcgcccacaggacgttaagttcccgggtggcggtcagatcgttggtggagtttacttgttgccgcgcaggggccctagattgggtgtgcgcgcgacgaggaagacttccgagcggtcgcaactcgcggtagacgtcagcctatccccaaggcgcgtcggcccgagggcaggacctgggctcagcccgggtacccctggcccctctacggcaatgagggctgcgggtgggcgggatggctcctgtcccccgtggctctcggcctagctggggccccacagacccccggcgtaggtcgcgcaatttgggtaaggtcatcgacaccctcacgtgcggcttcgccgacctcatggggtacattccgctcgtcggcgcccctcttgggggcgctccagggccctggcgcatggcgtccgggtcctggaagacggcgtgaattatgcaacagggaaccttcctggttgctctttttctatcttccttctggccctgctctcttgcctgaccgtgcccgcgtcgcctatcaagtacgcaactcctcgggcctctaccatgtcaccaatgattgccctaactcgagtattgtgtacgagacggccgataccattctacattctccggggtgtgtcccttgcgttcgcgagggtaacgcctcgaaagttgggtggcggtggcccccacagtcgccaccagggatggcagactccccacaacgcagcttcgacgtcacatcgatctgcttgtcgggagcgccaccctctgctcggccctctatgtgggggactttgcgggtctgtcttccttgtcggtcaactgttcactttctcccccaggcgccactggacaacgcaagactgcaactgttctatctaccccggccataacgggtcaccgcatggcatgggatatgatgatgaactggtccccacagcagcgctggtagtagctcagctgctcagggtcccgcaagccatcttggacatgatcgctggtgcccactggggagtcctagcgggcatagcgtatttctccatggtggggaactgggcgaaggcttagtggtgctgttgctgtttgccggcgttgatgcgggaacccacatcaccggggggagtgtcgctcattccacggcacgactcaccggtcttttcagtcgtggctcccagcagcatatccagctgatcaacaccaacggagttggcacatcaatcgcacggccctgaactgtaatgaaagcctcaacactggctggctagcggggctcttctattccaacaaattcaactcttcaggctgccccgagaggttggccagctgtagacccttgccgatttcgaccagggctggggtcctatcagctacgccaacggaagcggccccgaccaccggccctactgctggcactaccccccaaagccttgtggtatcgtgccagcacagagcgtatgtggcccagtgtattgttcacacccagccccgtggtggtgggaacgaccaacaagttgggcgcgcctacctacaactggggttgcaatgatacggacgtcttcgtccttaataacaccaggccgccgttgggcaattggttcgttgcacctggatgaactcatctggatttaccaaagtgtgcggagcgcctccttgtgtcatcggaggggggggcaacaacaccttgcactgccccactgactgtttccgcaagcatccggaagccacatactctcggtgtggtccggtccctggatcacgcccaggtgcctggtccactatccttataggctttggcattatccttgtactgtcaactacaccatgttcaaagtcaggatgtacgtgggaggggtcgagcacaggctggcgttgcttgcaactggacgcggggcgagcgttgcgatctggacgacagggacaggtccgagctcagcccgctgctgctgtccaccacacagtggcaggtccttccgtgttcctttaccaccttgccagccttgactaccggctcatccacctccaccagaacatcgtggatgtgcaatacttgtacggggtggggtcaagcattgtgtcctgggccatcaagtgggaatacgtcatcctcttatttctcctgcttgcagacgcgcgcactgctcctgcttgtggatgatgctactcatatcccaagcggaggcagcgttggagaaccttgtgttgctcaacgcggcgtctctggccgggacgcatggccttgcgtccttcctcgtgtttttctgctttgcatggtatctaagggtaagtgggcgcccggagcagcctacgccttctacgggatgtggcctctcctcctgctcctgttggcgttgccccagcgggcatacgcgctggacacggagatggccgcgtcgtgtggcggcgtgttattgtcgggttaatggcgctgactctgtcaccgcactacaagcgctacatcagctggtgcttatggtggcttcagtatttcttgaccagagtagaagcgcaactgcacgtgtgggttccccccctcaacgtccgggggggcgtgacgctgtcatcctactcatgtgtgctgtacacccggctttggtatttgacatcaccaagctgctgttggccgtcttcggccctctttggattcttcaaaccagtctgctcaaagtgcccttttcgtgcgcgttcaaggccttctccggatctgcgcgctagcgcgcaagatggccggcggccattacgtgcaaatggccatcatcaagatgggggcgcttactggcacctatgtttataaccatctcactcctcttcgggatgggcgcacaacggcctacgagatctggccgtggctgtagagccagtcgtcttctcccagatggagaccaagctcatcacgtggggggcggacaccgccgcgtgcggtgacatcatcaacggcttgccgtctctgcccgtaggggccgagagatactgctcggaccggccgatggaatggtctccaaggggtggaggttgctggcgcccatcacggcgtatgcccagcagacaaggggcctcttgggatgcataataaccagcctgacggccgggacaaaaaccaggtggagggtgaggttcagattgtgtcaactgctgcccagacctttctggcaacctgcatcaacggggtgtgctggactgtctaccacggggccggaacaaggaccatcgatcacccaaaggtcctgttatccagatgtacaccaatgtagaccaagacctcgtaggctggcccgctccccaaggtgcccgctcattgacaccctgcacttgcggctcctcggacctttacctggtcacgaggcacgccgagtcattcccgtacgccgacggggtgatagcaggggcagcctgctttcgccccggcctatctcttacttgaaaggctcctcggggggtccactactgtgccccgcgggacacgccgtaggcatattcaggccgcggtgtgcacccgtggagtggctaaggcggtggactttatccccgtagagagcctagagacaaccatgaggtccccggtgttcacagacaattcctccccaccagcagtgccccagagcttccaggtggctcacctcatgctcccaccggcagcggtaagagcaccaaggtcccggccgcatacgcggctcaggggtacaaggtgttggtgctcaacccctccgttgctgcaacactgggttttggtgcctacatgtccaaggccatggggttgatcctaacatcaggactggggtgaggacaattactactggcagctccatcacgtactccacctacggcaagttcctcgccgacggcgggtgctcggggggtgcttatgacataataatttgtgacgagtgcactccacggatgcaacatctatcttgggcatcggcaccgtccttgaccaagcagagactgcgggggcgagactggttgtgctcgccaccgctactcctccgggctccgtcaccgtgccccatcctacatcgaggaggttgctctgtctaccaccggagagatccccttttacggcaaggctatcccccttgaggcaatcaagggagggagacatctcattttctgccactcaaagaagaagtgcgacgagctcgccgcaaaactggtgcgatgggcatcaatgccgtggcttactaccgcggccttgacgtgtccgtcatcccgaccagtggcgacgttgtcgttgtggcaactgatgctctcatgaccggctataccggcgacttcgactcgggatagactgcaacacgtgtgtcacccagacagtcgacttcagccttgaccctaccttcaccattgagacaaccacacttccccaggacgctgtctcccgcacccaacgtcggggcaggactggcagggggaagccaggcattacagatttgtggcaccgggagagcgcccttccggcatgttcgactcgtccgtcctctgtgagtgctatgacgcaggctgtgcttggtatgagctcacacccgccgagaccacagtcaggctacgagatacatgaacactccggggcttcccgtgtgccaagaccatcttgaattttgggagggcgtcttcacgggtctcacccatatagacgcccacttcctatctcagacaaagcagagtggggaaaactttccttacctggtagctaccaagccaccgtgtgcgctagagctcaagctccccccccatcgtgggaccagatgtggaagtgcttgatccgcctcaaacccaccctccatgggccaacacctctgctatacaggctgggcgcggtcagaatgaagtcaccctgacgcacccaatcaccaagtacatcatgacatgcatgtcggct

SEQ ID NO: 538 - DNA, 4873 bp, Hepatitis C virus
caaccgtcgcccacaggacgttaagttcccgggtggcggtcagatcgttggtggagtttacttgttgccgcgcaggggccctagattgggtgtgcgcgcgacgaggaagacttccgagcggtcgcaactcgcggtagacgtcagcctatccccaaggcgcgtcggcccgagggcaggacctgggctcagcccgggtacccctggcccctctacggcaatgagggctgcgggtgggcgggatggctcctgtcccccgtggctctcggcctagctggggccccacagacccccggcgtaggtcgcgcaatttgggtaaggtcatcgacaccctcacgtgcggcttcgccgacctcatggggtacattccgctcgtcggcgcccctcttgggggcgctccagggccctggcgcatggcgtccgggtcctggaagacggcgtgaattatgcaacagggaaccttcctggttgctctttttctatcttccttctggccctgctctcttgcctgaccgtgcccgcgtcgcctatcaagtacgcaactcctcgggcctctaccatgtcaccaatgattgccctaactcgagtattgtgtacgagacggccgataccattctacattctccggggtgtgtcccttgcgttcgcgagggtaacgcctcgaaagttgggtggcggtggcccccacagtcgccaccagggatggcagactccccacaacgcagcttcgacgtcacatcgatctgcttgtcgggagcgccaccctctgctcggccctctatgtgggggactttgcgggtctgtcttcctcgtcggtcaactgttcactttctcccccaggcgccactggacaacgcaagactgcaactgttctatctaccccggccatataacgggtcaccgcatggcatgggatatgatgatgaactggtccctacagcagcgctggtagtagctcagctgctcagggtcccgcaagccatcttggacatgatcgctggtgcccactggggagtcctagcgggcatagcgtatttctccatggtggggaactgggcgaagtcttagtggtgctgttgctgtttgccggcgttgatgcgggaacccacatcaccggggggagtgtcgctcattccacggcacgactcaccggtcttttcagtcgtggctcccagcagcatatccagctgatcaacaccaacgcagttggcacatcaatcgcacggccctgaactgtaatgaaagcctcaacactggctggctagcggggctcttctattccaacaaattcaactcttcaggctgccccgagaggttggccagctgtagccccttgccgatttcgaccagggctggggtcctatcagctacgccaacggaagcggccccgaccaccggccctactgctggcactaccccccaaagccttgtggtatcgtgccagcacagagcgtatgtggcccagtgtatgcttcacacccagccccgtggtggtgggaacgaccaacaagttgggcgcgcctacctacaactggggttgcaatgatacggacgtcttcgtccttaataacaccaggccgccgttgggcaattggttggttgcacctggatgaactcatctggatttaccaaagtgtgcggagcgcctccttgtgtcatcggaggggggggcaacaacaccttgcactgccccactgactgtttccgcaagcatccggaagccacatactctcggtgtgctccggtccctggatcacgcccaggtgcctggtccactatccttataggctttggcattatccttgtactgtcaactacaccatgttcaaagtcaggatgtacgtgggaggggtcgagcacaggctgacgttgcttgcaactggacgcggggcgagcgttgcgatctggacgacagggacaggtccgagctcagcccgctgctgctgtccaccacacagtggcaggtccttccgtgttcctttaccaccttgccagccttgactaccgcctcatccacctccaccagaacatcgtggatgtgcaatacttgtacggggtggggtcaagcattgtgtcctgggccatcaagtgggaatacgtcatcctcttatttctcctgcttgcagacgcgcgatctgctcctgcttgtggatgatgctactcatatcccaagcggaggcagcgttggagaaccttgtgttgctcaacgcggcgtctctggccgggacgcatggccttgcgtccttcctcgtgtttttctgctttgcatggtattgaagggtaagtgggcgcccggagcagcctacgccttctacgggatgtggcctctcctcctgctcctgttggcgttgccccagcgggcatacgcgctggacacggagatggccgcgtcgtgtggcgggttgttattgtcgggttaatggcgctgactctgtcaccgcactacaagcgctacatcagctggtgcttatggtggcttcagtatttcttgaccagagtagaagcgcaactgcacgtgtgggttccccccctcaacgtccgggggggcgtgacgctgtcatcctactcatgtgtgctgtacacccggctttggtatttgacatcaccaagctgctgttggccgtcttcggccctttttggattcttcaaaccagtctgctcaaagtgcctatttcgtgcgcgttcaaggccttctccggatctgcgcgctagcgcgcaagatggccggcggccattacgtgcaaatggccatcatcaagatgggggcgcttactggcacctatgtttataaccatctcactcctcttcggactgggcgcacaacggcctacgagatctggccgtggctgtagagccagtcgtcttctcccagatggagaccaagctcatcacgtggggggcggacaccgccgcgtgcggtgacatcatcaacggcttcccgtctctgcccgtaggggccgagagatactgctcggaccggccgatggaatggtctccaaggggtggaggttgctggcgcccatcacggcgtatgcccagcagacaaggggcctcttgggatgcataataaccagcctgccggccgggacaaaaaccaggtggagggtgaggttcagattgtgtcaactgctgcccagacctttctggcaacctgcatcaacggggtgtgctggactgtctaccacggggccggaacaaggaccatgcatcacccaaaggtcctgttatccagatgtacaccaatgtagaccaagacctcgtaggctggcccgctccccaaggtgcccgctcattgacaccctgcacttgcggctcctcggacctttacctggtcacgaggcacgccatgtcattcccgtacgccgacggggtgatagcaggggcagcctgctttcgccccggcctatctcttacttgaaaggctcctcggggggtccactactgtgccccgcgggacacgccgtaggcatattagggccgcggtgtgcacccgtggagtggctaaggcggtggactttatccccgtagagagcctagagacaaccatgaggtccccggtgttcacagacaattcctccccaccagcagtgccccagagcttccaggtggctcactgcatgctcccaccggcagcggtaagagcaccaaggtcccggccgcatacgcggctcaggggtacaaggtgttggtgctcaacccctccgttgctgcaacactgggttttggtgcctacatgtccaagcccatggggttgatcctaacatcaggactggggtgaggacaattactactggcagctccatcacgtactccacctacggcaagttcctcgccgacggcgggtgctcggggggtgcttatgacataataatttgtgacgaggccactccacggatgcaacatctatcttgggcatcggcaccgtccttgaccaagcagagactgcgggggcgagactggttgtgctcgccaccgctactcctccgggctccgtcaccgtgccccatccaacatcgaggaggttgctctgtctaccaccggagagatccccttttacggcaaggctatcccccttgaggcaatcaagggagggagacatctcattttctgccactcaaagaagaagtgcgacgagctcgccgcaaaactgtcgcgatgggcatcaatgccgtggcttactaccgcggccttgacgtgtccgtcatcccgaccagtggcgacgttgtcgttgtggcaactgatgctctcatgaccggctataccggcgacttcgactcgtgatagactgcaacacgtgtgtcacccagacagtcgacttcagccttgaccctaccttcaccattgagacaaccacacttcctcaggacgctgtctcccgcacccaacgtcggggcaggactggcagggggaagccaggctctacagatttgtggcaccgggagagcgcccttccggcatgttcgactcgtccgtcctctgtgagtgctatgacgcaggctgtgcttggtatgagctcacacccgccgagaccacagtcaggctacggcatacatgaacactccggggcttcccgtgtgccaagaccatcttgaattttgggagggcgtcttcacgggtctcacccatatagacgcccacttcctatctcagacaaagcagagtggggaaaactttccttacctggtacgtaccaagccaccgtgtgcgctagagctcaagctccccccccatcgtgggaccagatgtggaagtgcttgatccgcctcaaacccaccctccatgggccaacacctctgctatacaggctgggcgcgttcagaatgaagtcaccctgacgcacccaatcaccaagtacatcatgacatgcatgtcggct

SEQ ID NO: 539 - DNA, 4873 bp, Hepatitis C virus
caaccgtcgcccacaggacgttaagttcccgggtggcggtcagatcgttggtggagtttacttgttgccgcgcaggggccctagattgggtgtgcgcgcgacgaggaagacttccgagcggtcgcaactcgcggtagacgtcagcctatccccaaggcgcgtcggcccgagggcaggacctgggctcagcctgggtacccctggcccctctacggcaatgagggctgcgggtgggcgggatggctcctgtcccccgtggctctcggcctagctggggccccacagacccccggcgtaggtcgcgcaatttgggtaaggtcatcgacaccctcacgtgcggcttcgccgacctcatggggtacattccgctcgtcggcgcccctcttgggggcgctccagggccctggcgcatggcgtccgggtcctggaagacggcgtgaattatgcaacagggaaccttcctggttgctctttttctatcttccttctggccctgctctcttgcctgaccgtgcccgcgtcgcctatcaagtacgcaactcctcgggcctctaccatgtcaccaatgattgccctaactcgagtattgtgtacgagacggccgataccattctacattctccggggtgtgtcccttgcgttcgcgagggtaacgcctcgaaagttgggtggcggtggcccccacagtcgccaccagggatggcagactccccacaacgcagcttcgacgtcacatcgatctgcttgtcgggagcgccaccctctgctcggccctctatgtgggggactttgcgggtctgtcttccttgtcggtcaactgttcactttctcccccaggcgccactggacaacgcaagactgcaactgttctatctaccccggccatataacgggtcaccgcatggcatgggatatgatgatgaactggtccctacagcagcgctggtagtagctcagctgctcagggtcccgcaagccatcttggacatgatcgctggtgcccactggggagtcctagcgggcatagcgtatttctccatggtggggaactgggcgaagtcttagtggtgctgttgctgtttgccggcgttgatgcgggaacccacatcaccggggggagtgtcgctcattccacggcacgactcaccggtcttttcagtcgtggctcccagcagcatatccagctgatcaacaccaacgcagttggcacatcaatcgcacggccctgaactgtaatgaaagcctcaacactggctggctagcggggctcttctattccaacaaattcaactcttcaggctgccccgagaggttggccagctgtagccccttgccgatttcgaccagggctggggtcctatcagctacgccaacggaagcggccccgaccaccggccctactgctggcactaccccccaaagccttgtggtatcgtgccagcacagagcgtatgtggcccagtgtatgcttcacacccagccccgtggtggtgggaacgaccaacaagttgggcgcgcctacctacaactggggttgcaatgatacggacgtcttcgtccttaataacaccaggccgccgttgggcaattggttggttgcacctggatgaactcatctggatttaccaaagtgtgcggagcgcctccttgtgtcatcggaggggggggcaacaacaccttgcactgccccactgactgtttccgcaagcatccggaagccacatactctcggtgtgctccggtccctggatcacgcccaggtgcctggtccactatccttataggctttggcattatccttgtactgtcaactacaccatgttcaaagtcaggatgtacgtgggaggggtcgagcacaggctgacgttgcttgcaactggacgcggggcgagcgttgcgatctggacgacagggacaggtccgagctcagcccgctgctgctgtccaccacacagtggcaggtccttccgtgttcctttaccaccttgccagccttgactaccgcctcatccacctccaccagaacatcgtggatgtgcaatacttgtacggggtggggtcaagcattgtgtcctgggccatcaagtgggaatacgtcatcctcttatttctcctgcttgcagacgcgcgatctgctcctgcttgtggatgatgctactcatatcccaagcggaggcagcgttggagaaccttgtgttgctcaacgcggcgtctctggccgggacgcatggccttgcgtccttcctcgtgtttttctgctttgcatggtattgaagggtaagtgggcgcccggagcagcctacgccttctacgggatgtggcctctcctcctgctcctgttggcgttgccccagcgggcatacgcgctggacacggagatggccgcgtcgtgtggcgggttgttattgtcgggttaatggcgctgactctgtcaccgcactacaagcgctacatcagctggtgcttatggtggcttcagtatttcttgaccagagtagaagcgcaactgcacgtgtgggttccccccctcaacgtccgggggggcgtgacgctgtcatcctactcatgtgtgctgtacacccggctttggtatttgacatcaccaagctgctgttggccgtcttcggccctctttggattcttcaaaccagtctgctcaaagtgcctatttcgtgcgcgttcaaggccttctccggatctgcgcgctagcgcgcaagatggccggcggccattacgtgcaaatggccatcatcaagatgggggcgcttactggcacctatgtttataaccatctcactcctcttcggactgggcgcacaacggcctacgagatctggccgtggctgtagagccagtcgtcttctcccagatggagaccaagctcatcacgtggggggcggacaccgccgcgtgcggtgacatcatcaacggcttcccgtctctgcccgtaggggccgagagatactgctcggaccggccgatggaatggtctccaaggggtggaggttgctggcgcccatcacggcgtatgcccagcagacaaggggcctcttgggatgcataataaccagcctgccggccgggacaaaaaccaggtggagggtgaggttcagattgtgtcaactgctgcccagacctttctggcaacctgcatcaacggggtgtgctggactgtctaccacggggccggaacaaggaccatgcatcacccaaaggtcctgttatccagatgtacaccaatgtagaccaagacctcgtaggctggcccgctccccaaggtgcccgctcattgacaccctgcacttgcggctcctcggacctttacctggtcacgaggcacgccatgtcattcccgtacgccgacggggtgatagcaggggcagcctgctttcgccccggcctatctcttacttgaaaggctcctcggggggtccactactgtgccccgcgggacacgccgtaggcatattagggccgcggtgtgcacccgtggagtggctaaggcggtggactttatccccgtagagagcctagagacaaccatgaggtccccggtgttcacagacaattcctccccaccagcagtgccccagagcttccaggtggctcactgcatgctcccaccggcagcggtaagagcaccaaggtcccggccgcatacgcggctcaggggtacaaggtgttggtgctcaacccctccgttgctgcaacactgggttttggtgcctacatgtccaagcccatggggttgatcctaacatcaggactggggtgaggacaattactactggcagctccatcacgtactccacctacggcaagttcctcgccgacggcgggtgctcggggggtgcttatgacataataatttgtgacgaggccactccacggatgcaacatctatcttgggcatcggcaccgtccttgaccaagcagagactgcgggggcgagactggttgtgctcgccaccgctactcctccgggctccgtcaccgtgccccatccaacatcgaggaggttgctctgtctaccaccggagagatccccttttacggcaaggctatcccccttgaggcaatcaagggagggagacatctcattttctgccactcaaagaagaagtgcgacgagctcgccgcaaaactgtcgcgatgggcatcaatgccgtggcttactaccgcggccttgacgtgtccgtcatcccgaccagtggcgacgttgtcgttgtggcaactgatgctctcatgaccggctataccggcgacttcgactcgtgatagactgcaacacgtgtgtcacccagacagtcgacttcagccttgaccctaccttcaccattgagacaaccacacttcctcaggacgctgtctcccgcacccaacgtcggggcaggactggcagggggaagccaggctctacagatttgtggcaccgggagagcgcccttccggcatgttcgactcgtccgtcctctgtgagtgctatgacgcaggctgtgcttggtatgagctcacacccgccgagaccacagtcaggctacggcatacatgaacactccggggcttcccgtgtgccaagaccatcttgaattttgggagggcgtcttcacgggtctcacccatatagacgcccacttcctatctcagacaaagcagagtggggaaaactttccttacctggtacgtaccaagccaccgtgtgcgctagagctcaagctccccccccatcgtgggaccagatgtggaagtgcttgatccgcctcaaacccaccctccatgggccaacacctctgctatacaggctgggcgcgttcagaatgaagtcaccctgacgcacccaatcaccaagtacatcatgacatgcatgtcggct

SEQ ID NO: 540 - DNA, 4873 bp, Hepatitis C virus; identical to SEQ ID NO: 524

SEQ ID NO: 541 - DNA, 4873 bp, Hepatitis C virus
caaccgtcgcccacaggacgttaagttcccgggtggcggtcagatcgttggtggagtttacttgttgccgcgcaggggccctagattgggtgtgcgcgcgacgaggaagacttccgagcggtcgcaactcgcggtagacgtcagcctatccccaaggcgcgtcggcccgagggcaggacctgggctcagcccgggtacccctggcccctctacggcaatgagggctgcgggtgggcgggatggctcctgtcccccgtggctctcggcctagctggggccccacagacccccggcgtaggtcgcgcaatttgggtaaggtcatcgacaccctcacgtgcggcttcgccgacctcatggggtacattccgctcgtcggcgcccctcttgggggcgctccagggccctggcgcatggcgtccgggtcctggaagacggcgtgaattatgcaacagggaaccttcctggttgctctttttctatcttccttctggccctgctctcttgcctgaccgtgcccgcgtcgcctatcaagtacgcaactcctcgggcctctaccatgtcaccaatgattgccctaactcgagtattgtgtacgagacggccgataccattctacattctccggggtgtgtcccttgcgttcgcgagggtaacgcctcgaaagttgggtggcggtggcccccacagtcgccaccagggatggcagactccccacaacgcagcttcgacgtcacatcgatctgcttgtcgggagcgccaccctctgctcggccctctatgtgggggactttgcgggtctgtcttccttgtcggtcaactgttcactttctcccccaggcgccactggacaacgcaagactgcaactgttctatctaccccggccatataacgggtcaccgcatggcatgggatatgatgatgaactggtccctacagcagcgctggtagtagctcagctgcttagggtcccgcaagccatcttggacatgatcgctggtgcccactggggagtcctagcgggcatagcgtatttctccatggtggggaactgggcgaagtcttagtggtgctgttgctgtttgccggcgttgatgcgggaacccacatcaccggggggagtgtcgctcattccacggcacgactcaccggtcttttcagtcgtggctcccagcagcatatccagctgatcaacaccaacgcagttggcacatcaatcgcacggccctgaactgtaatgaaagcctcaacactggctggctagcggggctcttctattccaacaaattcaactcttcaggctgccccgagaggttggccagctgtagccccttgccgatttcgaccagggctggggtcctatcagctacgccaacggaagcggccccgaccaccggccctactgctggcactaccccccaaagccttgtggtatcgtgccagcacagagcgtatgtggcccagtgtatgcttcacacccagccccgtggtggtgggaacgaccaacaagttgggcgcgcctacctacaactggggttgcaatgatacggacgtcttcgtccttaataacaccaggccgccgttgggcaattggttggttgcacctggatgaactcatctggatttaccaaagtgtgcggagcgcctccttgtgtcatcggaggggggggcaacaacaccttgcactgccccactgactgtttccgcaagcatccggaagccacatactctcggtgtgctccggtccctggatcacgcccaggtgcctggtccactatccttataggctttggcattatccttgtactgtcaactacaccatgttcaaagtcaggatgtacgtgggaggggtcgagcacaggctgacgttgcttgcaactggacgcggggcgagcgttgcgatctggacgacagggacaggtccgagctcagcccgctgctgctgtccaccacacagtggcaggtccttccgtgttcctttaccaccttgccagccttgactaccgcctcatccacctccaccagaacatcgtggatgtgcaatacttgtacggggtggggtcaagcattgtgtcctgggccatcaagtgggaatacgtcatcctcttatttctcctgcttgcagacgcgcgatctgctcctgcttgtggatgatgctactcatatcccaagcggaggcagcgttggagaaccttgtgttgctcaacgcggcgtctctggccgggacgcatggccttgcgtccttcctcgtgtttttctgctttgcatggtattgaagggtaagtgggcgcccggagcagcctacgccttctacgggatgtggcctctcctcctgctcctgttggcgttgccccagcgggcatacgcgctggacacggagatggccgcgtcgtgtggcgggttgttattgtcgggttaatggcgctgactctgtcaccgcactacaagcgctacatcagctggtgcttatggtggcttcagtatttcttgaccagagtagaagcgcaactgcacgtgtgggttccccccctcaacgtccgggggggcgtgacgctgtcatcctactcatgtgtgctgtacacccggctttggtatttgacatcaccaagctgctgttggccgtcttcggccctctttggattcttcaaaccagtctgctcaaagtgcctatttcgtgcgcgttcaaggccttctccggatctgcgcgctagcgcgcaagatggccggcggccattacgtgcaaatggccatcatcaagatgggggcgcttactggcacctatgtttataaccatctcactcctcttcggactgggcgcacaacggcctacgagatctggccgtggctgtagagccagtcgtcttctcccagatggagaccaagctcatcacgtggggggcggacaccgccgcgtgcggtgacatcatcaacggcttcccgtctctgcccgtaggggccgagagatactgctcggaccggccgatggaatggtctccaaggggtggaggttgctggcgcccatcacggcgtatgcccagcagacaaggggcctcttgggatgcataataaccagcctgccggccgggacaaaaaccaggtggagggtgaggttcagattgtgtcaactgctgcccagacctttctggcaacctgcatcaacggggtgtgctggactgtctaccacggggccggaacaaggaccatgcatcacccaaaggtcctgttatccagatgtacaccaatgtagaccaagacctcgtaggctggcccgctccccaaggtgcccgctcattgacaccctgcacttgcggctcctcggacctttacctggtcacgaggcacgccatgtcattcccgtacgccgacggggtgatagcaggggcagcctgctttcgccccggcctatctcttacttgaaaggctcctcggggggtccactactgtgccccgcgggacacgccgtaggcatattagggccgcggtgtgcacccgtggagtggctaaggcggtggactttatccccgtagagagcctagagacaaccatgaggtccccggtgttcacagacaattcctccccaccagcagtgccccagagcttccaggtggctcactgcatgctcccaccggcagcggtaagagcaccaaggtcccggccgcatacgcggctcaggggtacaaggtgttggtgctcaacccctccgttgctgcaacactgggttttggtgcctacatgtccaagcccatggggttgatcctaacatcaggactggggtgaggacaattactactggcagctccatcacgtactccacctacggcaagttcctcgccgacggcgggtgctcggggggtgcttatgacataataatttgtgacgaggccactccacggatgcaacatctatcttgggcatcggcaccgtccttgaccaagcagagactgcgggggcgagactggttgtgctcgccaccgctactcctccgggctccgtcaccgtgccccatccaacatcgaggaggttgctctgtctaccaccggagagatccccttttacggcaaggctatcccccttgaggcaatcaagggagggagacatctcattttctgccactcaaagaagaagtgcgacgagctcgccgcaaaactgtcgcgatgggcatcaatgccgtggcttactaccgcggccttgacgtgtccgtcatcccgaccagtggcgacgttgtcgttgtggcaactgatgctctcatgaccggctataccggcgacttcgactcgtgatagactgcaacacgtgtgtcacccagacagtcgacttcagccttgaccctaccttcaccattgagacaaccacacttcctcaggacgctgtctcccgcacccaacgtcggggcaggactggcagggggaagccaggctctacagatttgtggcaccggtagagcgcccttccggcatgttcgactcgtccgtcctctgtgagtgctatgacgcaggctgtgcttggtatgagctcacacccgccgagaccacagtcaggctacggcatacatgaacactccggggcttcccgtgtgccaagaccatcttgaattttgggagggcgtcttcacgggtctcacccatatagacgcccacttcctatctcagacaaagcagagtggggaaaactttccttacctggtacgtaccaagccaccgtgtgcgctagagctcaagctccccccccatcgtgggaccagatgtggaagtgcttgatccgcctcaaacccaccctccatgggccaacacctctgctatacaggctgggcgcgttcagaatgaagtcaccctgacgcacccaatcaccaagtacatcatgacatgcatgtcggct

SEQ ID NO: 542 - DNA, 4873 bp, Hepatitis C virus; identical to SEQ ID NO: 524

SEQ ID NO: 543 - DNA, 4852 bp, Hepatitis C virus
caaccgtcgcccacaggacgttaagttcccgggtggcggtcagatcgttggtggagtttacttgttgccgcgcaggggccctagattgggtgtgcgcgcgacgaggaagacttccgagcggtcgcaactcgcggtagacgtcagcctatccccaaggcgcgtcggcccgagggcaggacctgggctcagcccgggtacccctggcccctctacggcaatgagggctgcgggtgggcgggatggctcctgtcccccgtggctctcggcctagctggggccccacagacccccggcgtaggtcgcgcaatttgggtaaggtcatcgacaccctcacgtgcggcttcgccgacctcatggggtacattccgctcgtcggcgcccctcttgggggcgctccagggccctggcgcatggcgtccgggtcctggaagacggcgtgaattatgcaacagggaaccttcctggttgctctttttctatcttccttctggccctgctctcttgcctgaccgtgcccgcgtcgcctatcaagtacgcaactcctcgggcctctaccatgtcaccaatgattgccctaactcgagtattgtgtacgagacggccgataccattctacattctccggggtgtgtcccttgcgttcgcgagggtaacgcctcgaaagttgggtggcggtggcccccacagtcgccaccagggatggcagactccccacaacgcagcttcgacgtcacatcgatctgcttgtcgggagcgccaccctctgctcggccctctatgtgggggactttgcgggtctgtcttccttgtcggtcaactgttcactttctcccccaggcgccactggacaacgcaagactgcaactgttctatctaccccggccatataacgggtcaccgcatggcatgggatatgatgatgaactggtccctacagcagcgctggtagtagctcagctgctcagggtcccgcaagccatcttggacatgatcgctggtgcccactggggagtcctagcgggcatagcgtatttctccatggtggggaactgggcgaagtcttagtggtgctgttgctgtttgccggcgttgatgcgggaacccacatcaccggggggagtgtcgctcattccacggcacgactcaccggtcttttcagtcgtggctcccagcagcatatccagctgatcaacaccaacgcagttggcacatcaatcgcacggccctgaactgtaatgaaagcctcaacactggctggctagcggggctcttctattccaacaaattcaactcttcaggctgccccgagaggttggccagctgtagccccttgccgatttcgaccagggctggggtcctatcagctacgccaacggaagcggccccgaccaccggccctactgctggcactaccccccaaagccttgtggtatcgtgccagcacagagcgtatgtggcccagtgtatgcttcacacccagccccgtggtggtgggaacgaccaacaagttgggcgcgcctacctacaactggggttgcaatgataacaccaggccgccgttgggcaattggttcggttgcacctggatgaactctctggatttaccaaagtgtgcggagcgcctccttgtgtcatcggaggggggggcaacaacaccttgcactgccccactgactgtttccgcaagcatccggaagccacatactctcggtgtggctccggtccctggatcacgccaggtgcctggtccactatccttataggctttggcattatccttgtactgtcaactacaccatgttcaaagtcaggatgtacgtgggaggggtcgagcacaggctggacgttgcttgcaactggaccggggcgagcgttgcgatctggacgacagggacaggtccgagctcagcccgctgctgctgtccaccacacagtggcaggtccttccgtgttcctttaccaccttgccagccttgactaccggcctcatccacctccaccagacatcgtggatgtgcaatacttgtacggggtggggtcaagcattgtgtcctgggccatcaagtgggaatacgtcatcctcttatttctcctgcttgcagacgcgcgcatctgctcctgcttgtggatatgctactcatatcccaagcggaggcagcgttggagaaccttgtgttgctcaacgcggcgtctctggccgggacgcatggccttgcgtccttcctcgtgtttttctgctttgcatggtatctgaagggtaagtgggcgcccgagcagcctacgccttctacgggatgtggcctctcctcctgctcctgttggcgttgccccagcgggcatacgcgctggacacggagatggccgcgtcgtgtggcggcgttgttattgtcgggttaatgcgctgactctgtcaccgcactacaagcgctacatcagctggtgcttatggtggcttcagtatttcttgaccagagtagaagcgcaactgcacgtgtgggttccccccctcaacgtccggggggggcgtgacgctgtcatctactcatgtgtgctgtacacccggctttggtatttgacatcaccaagctgctgttggccgtcttcggccctctttggattcttcaaaccagtctgctcaaagtgccctatttcgtgcgcgttcaaggcttctccggatctgcgcgctagcgcgcaagatggccggcggccattacgtgcaaatggccatcatcaagatgggggcgcttactggcacctatgtttataaccatctcactcctcttcgggactgggcgcacaacggcctagagatctggccgtggctgtagagccagtcgtcttctcccagatggagaccaagctcatcacgtggggggcggacaccgccgcgtgcggtgacatcatcaacggcttgcccgtctctgcccgtaggggcgagagatactgctcggaccggccgatggaatggtctccaaggggtggaggttgctggcgcccatcacggcgtatgcccagcagacaaggggcctcttgggatgcataataaccagcctgaccggccgggacaaaaaccagtggagggtgaggttcagattgtgtcaactgctgcccagacctttctggcaacctgcatcaacggggtgtgctggactgtctaccacggggccggaacaaggaccatcgcatcacccaaaggtcctgtatccagatgtacaccaatgtagaccaagacctcgtaggctggcccgctccccaaggtgcccgctcattgacaccctgcacttgcggctcctcggacctttacctggtcacgaggcacgccgatgtcattcccgtacgccgaggggtgatagcaggggcagcctgctttcgccccggcctatctcttacttgaaaggctcctcggggggtccactactgtgccccgcgggacacgccgtaggcatattcagggccgcggtgtgcacccgggagtggctaaggcggtggactttatccccgtagagagcctagagacaaccatgaggtccccggtgttcacagacaattcctccccaccagcagtgccccagagcttccaggtggctcacctgcatgctcccaccggcagcgtaagagcaccaaggtcccggccgcatacgcggctcaggggtacaaggtgttggtgctcaacccctccgttgctgcaacactgggttttggtgcctacatgtccaaggcccatggggttgatcctaaatcaggactggggtgaggacaattactactggcagctccatcacgtactccacctacggcaagttcctcgccgacggcgggtgctcggggggtgcttatgacataataatttgtgacgagtgccactccacggatgcaacactatcttgggcatcggcaccgtccttgaccaagcagagactgcgggggcgagactggttgtgctcgccaccgctactcctccgggctccgtcaccgtgccccatcctaacatcgaggaggttgctcttctaccaccggagagatccccttttacggcaaggctatcccccttgaggcaatcaagggagggagacatctcattttctgccactcaaagaagaagtgcgacgagctcgccgcaaaactggtcgcgatgggcatcaatgcctggcttactaccgcggccttgacgtgtccgtcatcccgaccagtggcgacgttgtcgttgtggcaactgatgctctcatgaccggctataccggcgacttcgactcggtgatagactgcaacacgtggtcacccagacagtcgacttcagccttgaccctaccttcaccattgagacaaccacacttcctcaggacgctgtctcccgcacccaacgtcggggcaggactggcagggggaagccaggcatctacagatttgtggcaccggagagcgcccttccggcatgttcgactcgtccgtcctctgtgagtgctatgacgcaggctgtgcttggtatgagctcacacccgccgagaccacagtcaggctacgagcatacatgaacactccgggcttcccgtgtgccaagaccatcttgaattttgggatggcgtcttcacgggtctcacccatatagacgcccacttcctatctcagacaaagcagagtggggaaaactttccttacctggtagcgtaccaagccaccgtgtgcctagagctcaagctccccccccatcgtgggaccagatgtggaagtgcttgatccgcctcaaacccaccctccatgggccaacacctctgctatacaggctgggcgcggttcagaatgaagtcaccctacgcacccaatcaccaagtacatcatgacatgcatgtcggct

SEQ ID NO: 544 - DNA, 4873 bp, Hepatitis C virus
caaccgtcgcccacaggacgttaagttcccgggtggcggtcagatcgttggtggagtttacttgttgccgcgcaggggccctagattgggtgtgcgcgcgacgaggaagacttccgagcggtcgcaactcgcggtagacgtcagcctatccccaaggcgcgtcggcccgagggcaggacctgggctcagcccgggtacccctggcccctctacggcaatgagggctgcgggtgggcgggatggctcctgtcccccgtggctctcggcctagctggggccccacagacccccggcgtaggtcgcgcaatttgggtaaggtcatcgacaccctcacgtgcggcttcgccgacctcatggggtacattccgctcgtcggcgcccctcttgggggcgctccagggccctggcgcatggcgtccgggtcctggaagacggcgtgaattatgcaacagggaaccttcctggttgctctttttctatcttccttctggccctgctctcttgcctgaccgtgcccgcgtcgcctatcaagtacgcaactcctcgggcctctaccatgtcaccaatgattgccctaactcgagtattgtgtacgagacggccgataccattctacattctccggggtgtgtcccttgcgttcgcgagggtaacgcctcgaaagttgggtggcggtggcccccacagtcgccaccagggatggcagactccccacaacgcagcttcgacgtcacatcgatctgcttgtcgggagcgccaccctctgctcggccctctatgtgggggactttgcgggtctgtcttccttgtcggtcaactgttcactttctcccccaggcgccactggacaacgcaagactgcaactgttctatctaccccggccatataacgggtcaccgcatggcatgggatatgatgatgaactggtccctacagcagcgctggtagtagctcagctgctcagggtcccgcaagccatcttggacatgatcgctggtgcccactggggagtcctagcgggcatagcgtatttctccatggtggggaactgggcgaagtcttagtggtgctgttgctgtttgccggcgttgatgcgggaacccacatcaccggggggagtgtcgctcattccacggcacgactcaccggtcttttcagtcgtggctcccagcagcatatccagctgatcaacaccaacgcagttggcacatcaatcgcacggccctgaactgtaatgaaagcctcaacactggctggctagcggggctcttctattccaacaaattcaactcttcaggctgccccgagaggttggccagctgtagccccttgccgatttcgaccagggctggggtcctatcagctacgccaacggaagcggccccgaccaccggccctactgctggcactaccccccaaagccttgtggtatcgtgccagcacagagcgtatgtggcccagtgtatgcttcacacccagccccgtggtggtgggaacgaccaacaagttgggcgcgcctacctacaactggggttgcaatgatacggacgtcttcgtccttaataacaccaggccgccgttgggcaattggttggttgcacctggatgaactcatctggatttaccaaagtgtgcggagcgcctccttgtgtcatcggaggggggggcaacaacaccttgcactgccccactgactgtttccgcaagcatccggaagccacatactctcggtgtgctccggtccctggatcacgcccaggtgcctggtccactatccttataggctttggcattatccttgtactgtcaactacaccatgttcaaagtcaggatgtacgtgggaggggtcgagcacaggctgacgttgcttgcaactggacgcggggcgagcgttgcgatctggacgacagggacaggtccgagctcagcccgctgctgctgtccaccacacagtggcaggtccttccgtgttcctttaccaccttgccagccttgactaccgcctcatccacctccaccagaacatcgtggatgtgcaatacttgtacggggtggggtcaagcattgtgtcctgggccatcaagtgggaatacgtcatcctcttatttctcctgcttgcagacgcgcgatctgctcctgcttgtggatgatgctactcatatcccaagcggaggcagcgttggagaaccttgtgttgctcaacgcggcgtctctggccgggacgcatggccttgcgtccttcctcgtgtttttctgctttgcatggtattgaagggtaagtgggcgcccggagcagcctacgccttctacgggatgtggcctctcctcctgctcctgttggcgttgccccagcgggcatacgcgctggacacggagatggccgcgtcgtgtggcgggttgttattgtcgggttaatggcgctgactctgtcaccgcactacaagcgctacatcagctggtgcttatggtggcttcagtatttcttgaccagagtagaagcgcaactgcacgtgtgggttccccccctcaacgtccgggggggcgtgacgctgtcatcctactcatgtgtgctgtacacccggctttggtatttgacatcaccaagctgctgttggccgtcttcggccctctttggattcttcaaaccagtctgctcaaagtgcctatttcgtgcgcgttcaaggccttctccggatctgcgcgctagcgcgcaagatggccggcggccattacgtgcaaatggccatcatcaagatgggggcgcttactggcacctatgtttataaccatctcactcctcttcggactgggcgcacaacggcctacgagatctggccgtggctgtagagccagtcgtcttctcccagatggagaccaagctcatcacgtggggggcggacaccgccgcgtgcggtgacatcatcaacggcttcccgtctctgcccgtaggggccgagagatactgctcggaccggccgatggaatggtctccaaggggtggaggttgctggcgcccatcacggcgtatgcccagcagacaaggggcctcttgggatgcataataaccagcctgccggccgggacaaaaaccaggtggagggtgaggttcagattgtgtcaactgctgcccagacctttctggcaacctgcatcaacggggtgtgctggactgtctaccacggggccggaacaaggaccatgcatcacccaaaggtcctgttatccagatgtacaccaatgtagaccaagacctcgtaggctggcccgctccccaaggtgcccgctcattgacaccctgcacttgcggctcctcggacctttacctggtcacgaggcacgccatgtcattcccgtacgccgacggggtgatagcaggggcagcctgctttcgccccggcctatctcttacttgaaaggctcctcggggggtccactactgtgccccgcgggacacgccgtaggcatattagggccgcggtgtgcacccgtggagtggctaaggcggtggactttatccccgtagagagcctagagacaaccatgaggtccccggtgttcacagacaattcctccccaccagcagtgccccagagcttccaggtggctcactgcatgctcccaccggcagcggtaagagcaccaaggtcccggccgcatacgcggctcaggggtacaaggtgttggtgctcaacccctccgttgctgcaacactgggttttggtgcctacatgtccaagcccatggggttgatcctaacatcaggactggggtgaggacaattactactggcagctccatcacgtactccacctacggcaagttcctcgccgacggcgggtgctcggggggtgcttatgacataataatttgtgacgaggccactccacggatgcaacatctatcttgggcatcggcaccgtccttgaccaagcagagactgcgggggcgagactggttgtgctcgccaccgctactcctccgggctccgtcaccgtgccccatccaacatcgaggaggttgctctgtctaccaccggagagatccccttttacggcaaggctatcccccttgaggcaatcaagggagggagacatctcattttctgccactcaaagaagaagtgcgacgagctcgccgcaaaactgtcgcgatgggcatcaatgccgtggcctactaccgcggccttgacgtgtccgtcatcccgaccagtggcgacgttgtcgttgtggcaactgatgctctcatgaccggctataccggcgacttcgactcgtgatagactgcaacacgtgtgtcacccagacagtcgacttcagccttgaccctaccttcaccattgagacaaccacacttcctcaggacgctgtctcccgcacccaacgtcggggcaggactggcagggggaagccaggctctacagatttgtggcaccgggagagcgcccttccggcatgttcgactcgtccgtcctctgtgagtgctatgacgcaggctgtgcttggtatgagctcacacccgccgagaccacagtcaggctacggcatacatgaacactccggggcttcccgtgtgccaagaccatcttgaattttgggagggcgtcttcacgggtctcacccatatagacgcccacttcctatctcagacaaagcagagtggggaaaactttccttacctggtacgtaccaagccaccgtgtgcgctagagctcaagctccccccccatcgtgggaccagatgtggaagtgcttgatccgcctcaaacccaccctccatgggccaacacctctgctatacaggctgggcgcgttcagaatgaagtcaccctgacgcacccaatcaccaagtacatcatgacatgcatgtcggct

SEQ ID NO: 545 - DNA, 4873 bp, Hepatitis C virus
caaccgtcgcccacaggacgttaagttcccgggtggcggtcagatcgttggtggagtttacttgttgccgcgcaggggccctagattgggtgtgcgcgcgacgaggaagacttccgagcggtcgcaactcgcggtagacgtcagcctatccccaaggcgcgtcggcccgagggcaggacctgggctcagcccgggtacccctggcccctctacggcaatgagggctgcgggtgggcgggatggctcctgtcccccgtggctctcggcctagctggggccccacagacccccggcgtaggtcgcgcaatttgggtaaggtcatcgacaccctcacgtgcggcttcgccgacctcatggggtacattccgctcgtcggcgcccctcttgggggcgctccagggccctggcgcatggcgtccgggtcctggaagacggcgtgaattatgcaacagggaaccttcctggttgctctttttctatcttccttctggccctgctctcttgcctgaccgtgcccgcgtcgcctatcaagtacgcaactcctcgggcctctaccatgtcaccaatgattgccctaactcgagtattgtgtacgagacggccgataccattctacattctccggggtgtgtcccttgcgttcgcgagggtaacgcctcgaaagttgggtggcggtggcccccacagtcgccaccagggatggcagactccccacaacgcagcttcgacgtcacatcgatctgcttgtcgggagcgccaccctctgctcggccctctatgtgggggactttgcgggtctgtcttccttgtcggtcaactgttcactttctcccccaggcgccactggacaacgcaagactgcaactgttctatctaccccggccatataacgggtcaccgcatggcatgggatatgatgatgaactggtccctacagcagcgctggtagtagctcagctgctcagggtcccgcaagccatcttggacatgatcgctggtgcccactggggagtcctagcgggcatagcgtatttctccatggtggggaactgggcgaagtcttagtggtgctgttgctgtttgccggcgttgatgcgggaacccacatcaccggggggagtgtcgctcattccacggcacgactcaccggtcttttcagtcgtggctcccagcagcatatccagctgatcaacaccaacgcagttggcacatcaatcgcacggccctgaactgtaatgaaagcctcaacactggctggctagcggggctcttctattccaacaaattcaactcttcaggctgccccgagaggttggccagctgtagccccttgccgatttcgaccagggctggggtcctatcagctacgccaacggaagcggccccgaccaccggccctactgctggcactaccccccaaagccttgtggtatcgtgccagcacagagcgtatgtggcccagtgtatgcttcacacccagccccgtggtggtgggaacgaccaacaagttgggcgcgcctacctacaactggggttgcaatgatacggacgtcttcgtccttaataacaccaggccgccgttgggcaattggttggttgcacctggatgaactcatctggatttaccaaagtgtgcggagcgcctccttgtgtcatcggaggggggggcaacaacaccttgcactgccccactgactgtttccgcaagcatccggaagccacatactctcggtgtgctccggtccctggatcacgcccaggtgcctggtccactatccttataggctttggcattatccttgtactgtcaactacaccatgttcaaagtcaggatgtacgtgggaggggtcgagcacaggctgacgttgcttgcaactggacgcggggcgagcgttgcgatctggacgacagggacaggtccgagctcagcccgctgctgctgtccaccacacagtggcaggtccttccgtgttcctttaccaccttgccagccttgactaccgcctcatccacctccaccagaacatcgtggatgtgcaatacttgtacggggtggggtcaagcattgtgtcctgggccatcaagtgggaatacgtcatcctcttatttctcctgcttgcagacgcgcgatctgctcctgcttgtggatgatgctactcatatcccaagcggaggcagcgttggagaaccttgtgttgctcaacgcggcgtctctggccgggacgcatggccttgcgtccttcctcgtgtttttctgctttgcatggtattgaagggtaagtgggcgcccggagcagcctacgccttctacgggatgtggcctctcctcctgctcctgttggcgttgccccagcgggcatacgcgctggacacggagatggccgcgtcgtgtggcgggttgttattgtcgggttaatggcgctgactctgtcaccgcactacaagcgctacatcagctggtgcttatggtggcttcagtatttcttgaccagagtagaagcgcaactgcacgtgtgggttccccccctcaacgtccgggggggcgtgacgctgtcatcctactcatgtgtgctgtacacccggcattggtatttgacatcaccaagctgctgttggccgtcttcggccctctttggattcttcaaaccagtctgctcaaagtgcctatttcgtgcgcgttcaaggccttctccggatctgcgcgctagcgcgcaagatggccggcggccattacgtgcaaatggccatcatcaagatgggggcgcttactggcacctatgtttataaccatctcactcctcttcggactgggcgcacaacggcctacgagatctggccgtggctgtagagccagtcgtcttctcccagatggagaccaagctcatcacgtggggggcggacaccgccgcgtgcggtgacatcatcaacggcttcccgtctctgcccgtaggggccgagagatactgctcggaccggccgatggaatggtctccaaggggtggaggttgctggcgcccatcacggcgtatgcccagcagacaaggggcctcttgggatgcataataaccagcctgccggccgggacaaaaaccaggtggagggtgaggttcagattgtgtcaactgctgcccagacctttctggcaacctgcatcaacggggtgtgctggactgtctaccacggggccggaacaaggaccatgcatcacccaaaggtcctgttatccagatgtacaccaatgtagaccaagacctcgtaggctggcccgctccccaaggtgcccgctcattgacaccctgcacttgcggctcctcggacctttacctggtcacgaggcacgccatgtcattcccgtacgccgacggggtgatagcaggggcagcctgctttcgccccggcctatctcttacttgaaaggctcctcggggggtccactactgtgccccgcgggacacgccgtaggcatattagggccgcggtgtgcacccgtggagtggctaaggcggtggactttatccccgtagagagcctagagacaaccatgaggtccccggtgttcacagacaattcctccccaccagcagtgccccagagcttccaggtggctcactgcatgctcccaccggcagcggtaagagcaccaaggtcccggccgcatacgcggctcaggggtacaaggtgttggtgctcaacccctccgttgctgcaacactgggttttggtgcctacatgtccaagcccatggggttgatcctaacatcaggactggggtgaggacaattactactggcagctccatcacgtactccacctacggcaagttcctcgccgacggcgggtgctcggggggtgcttatgacataataatttgtgacgaggccactccacggatgcaacatctatcttgggcatcggcaccgtccttgaccaagcagagactgcgggggcgagactggttgtgctcgccaccgctactcctccgggctccgtcaccgtgccccatccaacatcgaggaggttgctctgtctaccaccggagagatccccttttacggcaaggctatcccccttgaggcaatcaagggagggagacatctcattttctgccactcaaagaagaagtgcgacgagctcgccgcaaaactgtcgcgatgggcatcaatgccgtggcttactaccgcggccttgacgtgtccgtcatcccgaccagtggcgacgttgtcgttgtggcaactgatgctctcatgaccggctataccggcgacttcgactcgtgatagactgcaacacgtgtgtcacccagacagtcgacttcagccttgaccctaccttcaccattgagacaaccacacttcctcaggacgctgtctcccgcacccaacgtcggggcaggactggcagggggaagccaggctctacagatttgtggcaccgggagagcgcccttccggcatgttcgactcgtccgtcctctgtgagtgctatgacgcaggctgtgcttggtatgagctcacacccgccgagaccacagtcaggctacggcatacatgaacactccggggcttcccgtgtgccaagaccatcttgaattttgggagggcgtcttcacgggtctcacccatatagacgcccacttcctatctcagacaaagcagagtggggaaaactttccttacctggtacgtaccaagccaccgtgtgcgctagagctcaagctccccccccatcgtgggaccagatgtggaagtgcttgatccgcctcaaacccaccctccatgggccaacacctctgctatacaggctgggcgcgttcagaatgaagtcaccctgacgcacccaatcaccaagtacatcatgacatgcatgtcggct

SEQ ID NO: 546 - DNA, 4873 bp, Hepatitis C virus
caaccgtcgcccacaggacgtcaagttcccgggtggcggtcagatcgttggtggagtttatttgttgccgcgcaggggccctagattgggtgtgcgcgcgacgaggaagacttccgagcggtcgcaactcgaggtagacgtcagcctatccccaaggcgcgtcggcccgagggcaggacctgggctcagcccgggtacccttggcccctctatggcaatgagggctgcgggtgggcgggatggctcctgtcccccgtggctctcggcctagctggggccccacagacccccggcgtaggtcgcgcaatttgggtaaggtcatcgataccctcacgtgcggcttcgccgacctcatggggtacattccgctcgtcggcgcccctcttggaggcgctccagggccctggcgcatggcgtccgggttctggaagacggcgtgaactatgcaacagggaatcttcccggttgctctttctctatcttccttctggctctgctctcttgcctgaccgtgcccgcgtcgcctaccaagtacgcaactcctcgggcctttatcatgtcaccaatgattgccccaactcgagtattgtgtacgagacggccgataccatcctacattctccggggtgtgtcccttgcgttcgcgagggtaacacctcaaaagttgggtgccagtgtcccccacagtggccaccagggacggcaaactccccgcgacgcagcttcgacgtcacatcgatctgcttgtcgggagtgccaccctctgttcagccctatatgtgggggactttgcgggtctgtctttcttgtcggtcaactgttcactttctcccccaggcgccactggacaacgcaagactgcaactgctctatctaccccggccatataacgggtcaccgcatggcatgggatatgatgatgaactggtccctacaacagcgctggtagtagctcagctgctcagggttccgcaagccatcttggatatgatcgcgggtgcccactggggggtcctagcgggcatagcgtatttttccatggtggggaactgggcgaagtcctggtagtgctgttgctgtttgccagcgtcgatgcggaaacccgcaccaccggggggagtgctgctcacaccacgtttggactcgccagtttattcaatccgggccccagccagaaaatccagctgattaacagcaacgcagttggcacatcaatcgcacagccttgaactgtaatgcgagcctcgacactggctgggtggcggggctcctctattaccacaagttcaactcttcgggctgcaccgagaggatggccagctgtagccccttgccaatttcgcccagggctggggccctatcagctacgccaacggaagcggccccgaacaccgcccctactgctggcactaccctccaaaaccttgtggtatcgtgccagcgctgaatgtatgtggcccagtgtacgcttcactcccagccccgtggtagtggggacgaccgacaagttgggcgcgcccacctacaaatggggtgccaatgagacggacgtcttcattcttaataacaccaggccaccgttgggcaattggttggttgcacctggatgaattcatctggatttaccaaagtgtgcggagcgcctccttgtaacatcggagggatgggcaacaacaccttgcactgccccactgattgtttccgcaagcatccggaagccacatactctcggtgtgctccggcccctggctcacgcccaggtgcttggtccactatgcttataggctttggcattatccttgtaccgtcaactacaccatgttcaaagtcaggatgtacgtgggaggggtcgagcacaggctgacgtggcctgcaactggacgcggggcgaaccttgtgatctggacgacagggacaggtccgagctcagcccgctgctgctgtccaccacacagtggcaggtccttccgtgctccttcacgaccctgccagccttgactaccgcctcatccacctccaccagaatatcgtggacgtgcaatacttgtacggggtggggtcgagcattgtgtcctgggccatcaagtgggagtacgtcatcctcttgtttctcctgcttgcagacgcgcgatctgctcctgcttgtggatgatgttgctcatatcccaagcggaggcagctttggaaaatcttgtattgctcaatgcggcgtctctggccgggacgcacggtcttgtgtccttcctcgtgtttttctgctttgcatggtattgaagggtaggtgggtgcccggggtggcctacgcctgctacgggatgtggcccttcctcctgctcctgttggcgttgccccaacgggcatacgcgctggacacggagatggccgcgtcgtgtggcggattgttcttgccgggttaatggcgctgactctgtcaccgcattacaagcgctatatcagctggtgcttatggtggcttcagtatttcctgactagagtagaagcgcaactgcacgtgtgggttccccccctcaacgttcgagggggcgcgacgctgtcatcctactcatgtgtgttgtacacccggctttggtatttgacatcaccaagctactgctggctgtcttcggacccctttggattcttcaggccagtctgctcaaagtgcctacttcgtgcgcgttcaaggccttctccggatctgcgcgctagtgcgcaaggtggccggaggccattacgtgcagatggtcatcatcaagatgggggcgcttgttggcacttatgtctataaccatctcactcctcttcggactgggcgcacaacggcctgcaagatctggccgtggctgtagagccagtcgtcttctcccaaatagagaccaagctcatcacgtggggggcggacaccgccgcgtgcggtgacatcatcgacggcttcccgtctccgcccgcaggggccgagagatactgctcggaccggctgatgggatggtctcaaaggggtggaggttgctggcgcccatcacggcgtatgcccagcagacaaggggcctcttgggatgcataatcaccagcctgccggccgggacaaaaaccaggtggagggtgaggttcaaattgtgtcaactgctacccagaccttcctggcgacctgcatcaacggggtgtgctggactgtctaccacggggccggaacaaggaccatgcgtcgcccaagggccctgtcatccaaatgtataccaatgtggaccaagatctcgtaggctggcccgctccccaaggcgcccgctcattgacaccctgcgcttgtggctcctcggacctttacctggtcacgaggcacgccatgtcattcctgtgcgcaggcggggtgatagcagaggcagcctgctttcgccccggcccatctcttacttgaaaggctcctcggggggcccgctgctgtgccccgcgggacacgccgtaggcatattagagctgcggtgtgcactcgtggagtggccaaggcggtggacttcatccccgtagagagcttggaaacaaccatgaggtctccggtgttcacagacaactcttctccaccagcagtgccccagtgcttccaagtggcccactacatgctcccaccggcagcggtaagagtaccaaggtcccggccgcgtacgcggctcagggctacaaggtgctggtgctcaacccctccgttgctgcaacgctgggctttggtgcttacatgtccaagcccatgggattgatcctaacatcaggactggggtgaggacaattactactggcagccccatcacgtactccacctacggcaagtttcttgccgacggcgggtgctcagggggcgcttatgacataataatttgtgacgaggccactccacggatgcaacatccatcttgggcatcggcactgtccttgaccaagcagagactgcgggggcgagactggttgtgctcgccaccgctacccctccgggttccgtcaccgtgccccacccaacatcgaggaggttgctctgtccaccaccggagagattcctttttatggcaaggctatcccccttgagacaatcaagggggggagacatctcattttttgccactcaaagaagaagtgcgacgagctcgctgcaaagctgtcgcgatgggcgtcaacgccgtggcctactaccgcggccttgacgtgtccgtcatcccgaccagcggcgatgttgtcgtcgtggcaactgatgctctcatgaccggctttaccggcgacttcgactcgtgatagattgcaacacgtgtgtcacccagacagtcgacttcagccttgatcctaccttcaccattgagacgaccacgctcccccaggacgccgtctcccgcactcaacgtcgggggaggactggcagggggaagccaggctctacagatttgtggcaccgggggaacgcccttccggcatgttcgactcgtccgtcctctgcgagtgctatgacgcgggctgtgcttggtatgaactcacacccgccgagaccacagttaggctgcggcgtacatgaacaccccggggctccccgtgtgccaagaccatcttgaattttgggagggcgtctttacgggtctcacccacatagacgcccacttcctatctcagacaaagcagagtggggaaaaccttccttacctggtacgtaccaagccaccgtgtgcgctagggcccaagcccctcctccatcgtgggaccaaatgtggaagtgcctgatccgcctcaagcccacccttcatgggccgacacctctgctatacagactgggtgcgttcagaatgaggtcaccctgacacacccagtcaccaagtacatcatgacatgcatgtcggct

SEQ ID NO: 547 - DNA, 4873 bp, Hepatitis C virus
caaccgtcgcccacaggacgtcaagttcccgggtggcggtcagatcgttggtggagtttatttgttgccgcgcaggggccctagattgggtgtgcgcgcgacgaggaagacttccgagcggtcgcaactcgaggtagacgtcagcctatccccaaggcgcgtcggcccgagggcaggacctgggctcagcccgggtacccttggcccctctatggcaatgagggctgcgggtgggcgggatggctcctgtcccccgtggctctcggcctagctggggccccacagacccccggcgtaggtcgcgcaatttgggtaaggtcatcgataccctcacgtgcggcttcgccgacctcatggggtacattccgctcgtcggcgcccctcttggaggcgctccagggccctggcgcatggcgtccgggttctggaagacggcgtgaactatgcaacagggaatcttcccggttgctctttctctatcttccttctggctctgctctcttgcctgaccgtgcccgcgtcgcctaccaagtacgcaactcctcgggcctttatcatgtcaccaatgattgccccaactcgagtattgtgtacgagacggccgataccatcctacattctccggggtgtgtcccttgcgttcgcgagggtaacacctcaaaagttgggtgccagtgtcccccacagtggccaccagggacggcaaactccccgcgacgcagcttcgacgtcacatcgatctgcttgtcgggagtgccaccctctgttcagccctatatgtgggggactttgcgggtctgtctttcttgtcggtcaactgttcactttctcccccaggcgccactggacaacgcaagactgcaactgctctatctaccccggccatataacgggtcaccgcatggcatgggatatgatgatgaactggtccctacaacagcgctggtagtagctcagctgctcagggttccgcaagccatcttggatatgatcgcgggtgcccactggggggtcctagcgggcatagcgtatttttccatggtggggaactgggcgaagtcctggtagtgctgttgctgtttgccagcgtcgatgcggaaacccgcaccaccggggggagtgctgctcacaccacgtttggactcgccagtttattcaatccgggccccagccagaaaatccagctgattaacagcaacgcagttggcacatcaatcgcacagccttgaactgtaatgcgagcctcgacactggctgggtggcggggctcctctattaccacaagttcaactcttcgggctgcaccgagaggatggccagctgtagccccttgccaatttcgcccagggctggggccctatcagctacgccaacggaagcggccccgaacaccgcccctactgctggcactaccctccaaaaccttgtggtatcgtgccagcgctgaatgtatgtggcccagtgtacgcttcactcccagccccgtggtagtggggacgaccgacaagttgggcgcgcccacctacaaatggggtgccaatgagacggacgtcttcattcttaataacaccaggccaccgttgggcaattggttggttgcacctggatgaattcatctggttttaccaaagtgtgcggagcgcctccttgtaacatcggagggatgggcaacaacaccttgcactgccccactgattgtttccgcaagcatccggaagccacatactctcggtgtgctccggcccctggctcacgcccaggtgcttggtccactatgcttataggctttggcattatccttgtaccgtcaactacaccatgttcaaagtcaggatgtacgtgggaggggtcgagcacaggctgacgtggcctgcgactggacgcggggcgaaccttgtgatctggacgacagggacaggtccgagctcagcccgctgctgctgtccaccacacagtggcaggtccttccgtgctccttcacgaccctgccagccttgactaccgcctcatccacctccaccagaatatcgtggacgtgcaatacttgtacggggtggggtcgagcattgtgtcctgggccatcaagtgggagtacgtcatcctcttgtttctcctgcttgcagacgcgcgatctgctcctgcttgtggatgatgttgctcatatcccaagcggaggcagctttggaaaatcttgtattgctcaatgcggcgtctctggccgggacgcacggtcttgtgtccttcctcgtgtttttctgctttgcatggtattgaagggtaggtgggtgcccggggtggcctacgcctgctacgggatgtggcccttcctcctgctcctgttggcgttgccccaacgggcatacgcgctggacacggagatggccgcgtcgtgtggcggattgttcttgccgggttaatggcgctgactctgtcaccgcattacaagcgctatatcagctggtgcttatggtggcttcagtatttcctgactagagtagaagcgcaactgcacgtgtgggttccccccctcaacgttcgagggggcgcgacgctgtcatcctactcatgtgtgttgtacacccggctttggtatttgacatcaccaagctactgctggctgtcttcggacccctttggattcttcaggccagtctgctcaaagtgcctacttcgtgcgcgttcaaggccttctccggatctgcgcgctagtgcgcaaggtggccggaggccattacgtgcagatggtcatcatcaagatgggggcgcttgttggcacttatgtctataaccatctcactcctcttcggactgggcgcacaacggcctgcaagatctggccgtggctgtagagccagtcgtcttctcccaaatggagaccaagctcatcacgtggggggcggacaccgccgcgtgcggtgacatcatcgacggcttcccgtctccgcccgcaggggccgagagatactgctcggaccggctgatgggatggtctcaaaggggtggaggttgctggcgcccatcacggcgtatgcccagcagacaaggggcctcttgggatgcataatcaccagcctgccggccgggacaaaaaccaggtggagggtgaggttcaaattgtgtcaactgctacccagaccttcctggcgacctgcatcaacggggtgtgctggactgtctaccacggggccggaacaaggaccatgcgtcgcccaagggccctgtcatccaaatgtataccaatgtggaccaagatctcgtaggctggcccgctccccaaggcgcccgctcattgacaccctgcgcttgtggctcctcggacctttacctggtcacgaggcacgccatgtcattcctgtgcgcaggcggggtgatagcagaggcagcctgctttcgccccggcccatctcttacttgaaaggctcctcggggggcccgctgctgtgccccgcgggacacgccgtaggcatattagagctgcggtgtgcactcgtggagtggccaaggcggtggacttcatccccgtagagagcttggaaacaaccatgaggtctccggtgttcacagacaactcttctccaccagcagtgccccagtgcttccaagtggcccactacatgctcccaccggcagcggtaagagtaccaaggtcccggccgcgtacgcggctcagggctacaaggtgctggtgctcaacccctccgttgctgcaacgctgggctttggtgcttacatgtccaagcccatgggattgatcctaacatcaggactggggtgaggacaattactactggcagccccatcacgtactccacctacggcaagtttcttgccgacggcgggtgctcagggggcgcttatgacataataatttgtgacgaggccactccacggatgcaacatccatcttgggcatcggcactgtccttgaccaagcagagactgcgggggcgagactggttgtgctcgccaccgctacccctccgggttccgtcaccgtgccccacccaacatcgaggaggttgctctgtccaccaccggagagattcctttttatggcaaggctatcccccttgagacaatcaagggggggagacatctcattttttgccactcaaagaagaagtgcgacgagctcgctgcaaagctgtcgcgatgggcgtcaacgccgtggcctactaccgcggccttgacgtgtccgtcatcccgaccagcggcgatgttgtcgtcgtggcaactgatgctctcatgaccggctttaccggcgacttcgactcgtgatagattgcaacacgtgtgtcacccagacagtcgacttcagccttgatcctaccttcaccattgagacgaccacgctcccccaggacgccgtctcccgcactcaacgtcgggggaggactggcagggggaagccaggctctacagatttgtggcaccgggggaacgcccttccggcatgttcgactcgtccgtcctctgcgagtgctatgacgcgggctgtgcttggtatgaactcacacccgccgagaccacagttaggctgcggcgtacatgaacaccccggggctccccgtgtgccaagaccatcttgaattttgggagggcgtctttacgggtctcacccacatagacgcccacttcctatctcagacaaagcagagtggggaaaaccttccttacctggtacgtaccaagccaccgtgtgcgctagggcccaagcccctcctccatcgtgggaccaaatgtggaagtgcctgatccgcctcaagcccacccttcatgggccgacacctctgctatacagactgggtgcgttcagaatgaggtcaccctgacacacccagtcaccaagtacatcatgacatgcatgtcggct

SEQ ID NO: 548 - DNA, 4873 bp, Hepatitis C virus
caaccgtcgcccacaggacgtcaagttcccgggtggcggtcagatcgttggtggagtttatttgttgccgcgcaggggccctagattgggtgtgcgcgcgacgaggaagacttccgagcggtcgcaactcgaggtagacgtcagcctatccccaaggcgcgtcggcccgagggcaggacctgggctcagcccgggtacccttggcccctctatggcaatgagggctgcgggtgggcgggatggctcctgtcccccgtggctctcggcctagctggggccccacagacccccggcgtaggtcgcgcaatttgggtaaggtcatcgataccctcacgtgcggcttcgccgacctcatggggtacattccgctcgtcggcgcccctcttggaggcgctccagggccctggcgcatggcgtccgggttctggaagacggcgtgaactatgcaacagggaatcttcccggttgctctttctctatcttccttctggctctgctctcttgcctgaccgtgcccgcgtcgcctaccaagtacgcaactcctcgggcctttatcatgtcaccaatgattgccccaactcgagtattgtgtacgagacggccgataccatcctacattctccggggtgtgtcccttgcgttcgcgagggtaacacctcaaaagttgggtgccagtgtcccccacagtggccaccagggacggcaaactccccgcgacgcagcttcgacgtcacatcgatctgcttgtcgggagtgccaccctctgttcagccctatatgtgggggactttgcgggtctgtctttcttgtcggtcaactgttcactttctcccccaggcgccactggacaacgcaagactgcaactgctctatctaccccggccatataacgggtcaccgcatggcatgggatatgatgatgaactggtccctacaacagcgctggtagtagctcagctgctcagggttccgcaagccatcttggatatgatcgcgggtgcccactggggggtcctagcgggcatagcgtatttttccatggtggggaactgggcgaagtcctggtagtgctgttgctgtttgccagcgtcgatgcggaaacccgcaccaccggggggagtgctgctcacaccacgtttggactcgccagtttattcaatccgggccccagccagaaaatccagctgattaacagcaacgcagttggcacatcaatcgcacagccttgaactgtaatgcgagcctcgacactggctgggtggcggggctcctctattaccacaagttcaactcttcgggctgcaccgagaggatggccagctgtagccccttgccaatttcgcccagggctggggccctatcagctacgccaacggaagcggccccgaacaccgcccctactgctggcactaccctccaaaaccttgtggtatcgtgccagcgctgaatgtatgtggcccagtgtacgcttcactcccagccccgtggtagtggggacgaccgacaagttgggcgcgcccacctacaaatggggtgccaatgagacggacgtcttcattcttaataacaccaggccaccgttgggcaattggttggttgcacctggatgaattcatctggatttaccaaagtgtgcggagcgcctccttgtaacatcggagggatgggcaacaacaccttgcactgccccactgattgtttccgcaagcatccggaagccacatactctcggtgtgctccggcccctggctcacgcccaggtgcttggtccactatgcttataggctttggcattatccttgtaccgtcaactacaccatgttcaaagtcaggatgtacgtgggaggggtcgagcacaggctgacgtggcctgcaactggacgcggggcgaaccttgtgatctggacgacagggacaggtccgagctcagcccgctgctgctgtccaccacacagtggcaggtccttccgtgctccttcacgaccctgccagccttgactaccgcctcatccacctccaccagaatatcgtggacgtgcaatacttgtacggggtggggtcgagcattgtgtcctgggccatcaagtgggagtacgtcatcctcttgtttctcctgcttgcagacgcgcgatctgctcctgcttgtggatgatgttgctcatatcccaagcggaggcagctttggaaaatcttgtattgctcaatgcggcgtctctggccgggacgcacggtcttgtgtccttcctcgtgtttttctgctttgcatggtattgaagggtaggtgggtgcccggggtggcctacgcctgctacgggatgtggcccttcctcctgctcctgttggcgttgccccaacgggcatacgcgctggacacggagatggccgcgtcgtgtggcggattgttcttgccgggttaatggcgctgactctgtcaccgcattacaagcgctatatcagctggtgcttatggtggcttcagtatttcctgactagagtagaagcgcaactgcacgtgtgggttccccccctcaacgttcgagggggcgcgacgctgtcatcctactcatgtgtgttgtacacccggctttggtatttgacatcaccaagctactgctggctgtcttcggacccctttggattcttcaggccagtctgctcaaagtgcctacttcgtgcgcgttcaaggccttctccggatctgcgcgctagtgcgcaaggtggccggaggccattacgtgcagatggtcatcatcaagatgggggcgcttgttggcacttatgtctataaccatctcactcctcttcggactgggcgcacaacggcctgcaagatctggccgtggctgtagagccagtcgtcttctcccaaatggagaccaagctcatcacgtggggggcggacaccgccgcgtgcggtgacatcatcgacggcttcccgtctccgcccgcaggggccgagagatactgctcggaccggctgatgggatggtctcaaaggggtggaggttgctggcgcccatcacggcgtatgcccagcagacaaggggcctcttgggatgcataatcaccagcctgccggccgggacaaaaaccaggtggagggtgaggttcaaattgtgtcaactgctacccagaccttcctggcgacctgcatcaacggggtgtgctggactgtctaccacggggccggaacaaggaccatgcgtcgcccaagggccctgtcatccaaatgtataccaatgtggaccaagatctcgtaggctggcccgctccccaaggcgcccgctcattgacaccctgcgcttgtggctcctcggacctttacctggtcacgaggcacgccatgtcattcctgtgcgcaggcggggtgatagcagaggcagcctgctttcgccccggcccatctcttacttgaaaggctcctcggggggcccgctgctgtgccccgcgggacacgccgtaggcatattagagctgcggtgtgcactcgtggagtggccaaggcggtggacttcatccccgtagagagcttggaaacaaccatgaggtctccggtgttcacagacaactcttctccaccagcagtgccccagtgcttccaagtggcccactacatgctcccaccggcagcggtaagagtaccaaggtcccggccgcgtacgcggctcagggctacaaggtgctggtgctcaacccctccgttgctgcaacgctgggctttggtgcttacatgtccaagcccatgggattgatcctaacatcaggactggggtgaggacaattactactggcagccccatcacgtactccacctacggcaagtttcttgccgacggcgggtgctcagggggcgcttatgacataataatttgtgacgaggccactccacggatgcaacatccatcttgggcatcggcactgtccttgaccaagcagagactgcgggggcgagactggttgtgctcgccaccgctacccctccgggttccgtcaccgtgccccacccaacatcgaggaggttgctctgtccaccaccggagagattcctttttatggcaaggctatcccccttgagacaatcaagggggggagacatctcattttttgccactcaaagaagaagtgcgacgagctcgctgcaaagctgtcgcgatgggcgtcaacgccgtggcctactaccgcggccttgacgtgtccgtcatcccgaccagcggcgatgttgtcgtcgtggcaactgatgctctcatgaccggctttaccggcgacttcgactcgtgatagattgcaacacgtgtgtcacccagacagtcgacttcagccttgatcctaccttcaccattgagacgaccacgctcccccaggacgccgtctcccgcactcaacgtcgggggaggactggcagggggaagccaggctctacagatttgtggcaccgggggaacgcccttccggcatgttcgactcgtccgtcctctgcgagtgctatgacgcgggctgtgcttggtatgaactcacacccgccgagaccacagttaggctgcggcgtacatgaacaccccggggctccccgtgtgccaagaccatcttgaattttgggagggcgtctttacgggtctcacccacatagacgcccacttcctatctcagacaaagcagagtggggaaaaccttccttacctggtacgtaccaagccaccgtgtgcgctagggcccaagcccctcctccatcgtgggaccaaatgtggaagtgcctgatccgcctcaagcccacccttcatgggccgacacctctgctatacagactgggtgcgttcagaatgaggtcaccctgacacacccagtcaccaagtacatcatgacatgcatgtcggct

SEQ ID NO: 549 - DNA, 4873 bp, Hepatitis C virus; identical to SEQ ID NO: 548

SEQ ID NO: 550 - DNA, 4873 bp, Hepatitis C virus; identical to SEQ ID NO: 548

SEQ ID NO: 551 - DNA, 4873 bp, Hepatitis C virus
caaccgtcgcccacaggacgttaagttcccgggtggcggtcagatcgttggtggagtttacttgttgccgcgcaggggccctagattgggtgtgcgcgcgacgaggaagacttccgagcggtcgcaactcgcggtagacgtcagcctatccccaaggcgcgtcggcccgagggcaggacctgggctcagcccgggtacccctggcccctctacggcaatgagggctgcgggtgggcgggatggctcctgtcccccgtggctctcggcctagctggggccccacagacccccggcgtaggtcgcgcaatttgggtaaggtcatcgacaccctcacgtgcggcttcgccgacctcatggggtacattccgctcgtcggcgcccctcttgggggcgctccagggccctggcgcatggcgtccgggtcctggaagacggcgtgaattatgcaacagggaaccttcctggttgctctttttctatcttccttctggccctgctctcttgcctgaccgtgcccgcgtcgcctatcaagtacgcaactcctcgggcctctaccatgtcaccaatgattgccctaactcgagtattgtgtacgagacggccgataccattctacattctccggggtgtgtcccttgcgttcgcgagggtaacgcctcgaaagttgggtggcggtggcccccacagtcgccaccagggatggcagactccccacaacgcagcttcgacgtcacatcgatctgcttgtcgggagcgccaccctctgctcggccctctatgtgggggactttgcgggtctgtcttccttgtcggtcaactgttcactttctcccccaggcgccactggacaacgcaagactgcaactgttctatctaccccggccatataacgggtcaccgcatggcatgggatatgatgatgaactggtccctacagcagcgctggtagtagctcagctgctcagggtcccgcaagccatcttggacatgatcgctggtgcccactggggagtcctagcgggcatagcgtatttctccatggtggggaactgggcgaagtcttagtggtgctgttgctgtttgccggcgttgatgcgggaacccacatcaccggggggagtgtcgctcattccacggcacgactcaccggtcttttcagtcgtggctcccagcagcatatccagctgatcaacaccaacgcagttggcacatcaatcgcacggccctgaactgtaatgaaagcctcaacactggctggctagcggggctcttctattccaacaaattcaactcttcaggctgccccgagaggttggccagctgtagccccttgccgatttcgaccagggctggggtcctatcagctacgccaacggaagcggccccgaccaccggccctactgctggcactaccccccaaagccttgtggtatcgtgccagcacagagcgtatgtggcccagtgtatgcttcacacccagccccgtggtggtgggaacgaccaacaagttgggcgcgcctacctacaactggggttgcaatgatacggacgtcttcgtccttaataacaccaggccgccgttgggcaattggttggttgcacctggatgaactcatctggatttaccaaagtgtgcggagcgcctccttgtgtcatcggaggggggggcaacaacaccttgcactgccccactgactgtttccgcaagcatccggaagccacatactctcggtgtgctccggtccctggatcacgcccaggtgcctggtccactatccttataggctttggcattatccttgtactgtcaactacaccatgttcaaagtcaggatgtacgtgggaggggtcgagcacaggctgacgttgcttgcaactggacgcggggcgagcgttgcgatctggacgacagggacaggtccgagctcagcccgctgctgctgtccaccacacagtggcaggtccttccgtgttcctttaccaccttgccagccttgactaccgcctcatccacctccaccagaacatcgtggatgtgcaatacttgtacggggtggggtcaagcattgtgtcctgggccatcaagtgggaatacgtcatcctcttatttctcctgcttgcagacgcgcgatctgctcctgcttgtggatgatgctactcatatcccaagcggaggcagcgttggagaaccttgtgttgcccaacgcggcgtctctggccgggacgcatggccttgcgtccttcctcgtgtttttctgctttgcatggtattgaagggtaagtgggcgcccggagcagcctacgccttctacgggatgtggcctctcctcctgctcctgttggcgttgccccagcgggcatacgcgctggacacggagatggccgcgtcgtgtggcgggttgttattgtcgggttaatggcgctgactctgtcaccgcactacaagcgctacatcagctggtgcttatggtggcttcagtatttcttgaccagagtagaagcgcaactgcacgtgtgggttccccccctcaacgtccgggggggcgtgacgctgtcatcctactcatgtgtgctgtacacccggctttggtatttgacatcaccaagctgctgttggccgtcttcggccctctttggattcttcaaaccagtctgctcaaagtgcctatttcgtgcgcgttcaaggccttctccggatctgcgcgctagcgcgcaagatggccggcggccattacgtgcaaatggccatcatcaagatgggggcgcttactggcacctatgtttataaccatctcactcctcttcggactgggcgcacaacggcctacgagatctggccgtggctgtagagccagtcgtcttctcccagatggagaccaagctcatcacgtggggggcggacaccgccgcgtgcggtgacatcatcaacggcttcccgtctctgcccgtaggggccgagagatactgctcggaccggccgatggaatggtctccaaggggtggaggttgctggcgcccatcacggcgtatgcccagcagacaaggggcctcttgggatgcataataaccagcctgccggccgggacaaaaaccaggtggagggtgaggttcagattgtgtcaactgctgcccagacctttctggcaacctgcatcaacggggtgtgctggactgtctaccacggggccggaacaaggaccatgcatcacccaaaggtcctgttatccagatgtacaccaatgtagaccaagacctcgtaggctggcccgctccccaaggtgcccgctcattgacaccctgcacttgcggctcctcggacctttacctggtcacgaggcacgccatgtcattcccgtacgccgacggggtgatagcaggggcagcctgctttcgccccggcctatctcttacttgaaaggctcctcggggggtccactactgtgccccgcgggacacgccgtaggcatattagggccgcggtgtgcacccgtggagtggctaaggcggtggactttatccccgtagagagcctagagacaaccatgaggtccccggtgttcacagacaattcctccccaccagcagtgccccagagcttccaggtggctcactgcatgctcccaccggcagcggtaagagcaccaaggtcccggccgcatacgcggctcaggggtacaaggtgttggtgctcaacccctccgttgctgcaacactgggttttggtgcctacatgtccaagcccatggggttgatcctaacatcaggactggggtgaggacaattactactggcagctccatcacgtactccacctacggcaagttcctcgccgacggcgggtgctcggggggtgcttatgacataataatttgtgacgaggccactccacggatgcaacatctatcttgggcatcggcaccgtccttgaccaagcagagactgcgggggcgagactggttgtgctcgccaccgctactcctccgggctccgtcaccgtgccccatccaacatcgaggaggttgctctgtctaccaccggagagatccccttttacggcaaggctatcccccttgaggcaatcaagggagggagacatctcattttctgccactcaaagaagaagtgcgacgagctcgccgcaaaactgtcgcgatgggcatcaatgccgtggcttactaccgcggccttgacgtgtccgtcatcccgaccagtggcgacgttgtcgttgtggcaactgatgctctcatgaccggctataccggcgacttcgactcgtgatagactgcaacacgtgtgtcacccagacagtcgacttcagccttgaccctaccttcaccattgagacaaccacacttcctcaggacgctgtctcccgcacccaacgtcggggcaggactggcagggggaagccaggctctacagatttgtggcaccgggagagcgcccttccggcatgttcgactcgtccgtcctctgtgagtgctatgacgcaggctgtgcttggtatgagctcacacccgccgagaccacagtcaggctacggcatacatgaacactccggggcttcccgtgtgccaagaccatcttgaattttgggagggcgtcttcacgggtctcacccatatagacgcccacttcctatctcagacaaagcagagtggggaaaactttccttacctggtacgtaccaagccaccgtgtgcgctagagctcaagctccccccccatcgtgggaccagatgtggaagtgcttgatccgcctcaaacccaccctccatgggccaacacctctgctatacaggctgggcgcgttcagaatgaagtcaccctgacgcacccaatcaccaagtacatcatgacatgcatgtcggct

SEQ ID NO: 552 - DNA, 4873 bp, Hepatitis C virus
caaccgtcgcccacaggacgtcaagttcccgggtggcggtcagatcgttggtggagtttatttgttgccgcgcaggggccctagattgggtgtgcgcgcgacgaggaagacttccgagcggtcgcaactcgaggtagacgtcagcctatccccaaggcgcgtcggcccgagggcaggacctgggctcagcccgggtacccttggcccctctatggcaatgagggctgcgggtgggcgggatggctcctgtcccccgtggctctcggcctagctggggccccacagacccccggcgtaggtcgcgcaatttgggtaaggtcatcgataccctcacgtgcggcttcgccgacctcatggggtacattccgctcgtcggcgcccctcttggaggcgctccagggccctggcgcatggcgtccgggttctggaagacggcgtgaactatgcaacagggaatcttcccggttgctctttctctatcttccttctggctctgctctcttgcctgaccgtgcccgcgtcgcctaccaagtacgcaactcctcgggcctttatcatgtcaccaatgattgccccaactcgagtattgtgtacgagacggccgataccatcctacattctccggggtgtgtcccttgcgttcgcgagggtaacacctcaaaagttgggtgccagtgtcccccacagtggccaccagggacggcaaactccccgcgacgcagcttcgacgtcacatcgatctgcttgtcgggagtgccaccctctgttcagccctatatgtgggggactttgcgggtctgtctttcttgtcggtcaactgttcactttctcccccaggcgccactggacaacgcaagactgcaactgctctatctaccccggccatataacgggtcaccgcatggcatgggatatgatgatgaactggtccctacaacagcgctggtagtagctcagctgctcagggttccgcaagccatcttggatatgatcgcgggtgcccactggggggtcctagcgggcatagcgtatttttccatggtggggaactgggcgaagtcctggtagtgctgttgctgtttgccagcgtcgatgcggaaacccgcaccaccggggggagtgctgctcacaccacgtttggactcgccagtttattcaatccgggccccagccagaaaatccagctgattaacagcaacgcagttggcacatcaatcgcacagccttgaactgtaatgcgagcctcgacactggctgggtggcggggctcctctattaccacaagttcaactcttcgggctgcaccgagaggatggccagctgtagccccttgccaatttcgcccagggctggggccctatcagctacgccaacggaagcggccccgaacaccgcccctactgctggcactaccctccaaaaccttgtggtatcgtgccagcgctgaatgtatgtggcccagtgtacgcttcactcccagccccgtggtagtggggacgaccgacaagttgggcgcgcccacctacaaatggggtgccaatgagacggacgtcttcattcttaataacaccaggccaccgttgggcaattggttggttgcacctggatgaattcatctggatttaccaaagtgtgcggagcgcctccttgtaacatcggagggatgggcaacaacaccttgcactgccccactgattgtttccgcaagcatccggaagccacatactctcggtgtgctccggcccctggctcacgcccaggtgcttggtccactatgcttataggctttggcattatccttgtaccgtcaactacaccatgttcaaagtcaggatgtacgtgggaggggtcgagcacaggctgacgtggcctgcaactggacgcggggcgaaccttgtgatctggacgacagggacaggtccgagctcagcccgctgctgctgtccaccacacagtggcaggtccttccgtgctccttcacgaccctgccagccttgactaccgcctcatccacctccaccagaatatcgtggacgtgcaatacttgtacggggtggggtcgagcattgtgtcctgggccatcaagtgggagtacgtcatcctcttgtttctcctgcttgcagacgcgcgatctgctcctgcttgtggatgatgttgctcatatcccaagcggaggcagctttggaaaatcttgtattgctcaatgcggcgtctctggccgggacgcacggtcttgtgtccttcctcgtgtttttctgctttgcatggtattgaagggtaggtgggtgcccggggtggcctacgcctgctacgggatgtggcccttcctcctgctcctgttggcgttgccccaacgggcatacgcgctggacacggagatggccgcgtcgtgtggcggattgttcttgccgggttaatggcgctgactctgtcaccgcattacaagcgctatatcagctggtgcttatggtggcttcagtatttcctgactagagtagaagcgcaactgcacgtgtgggttccccccctcaacgttcgagggggcgcgacgctgtcatcctactcatgtgtgttgtacacccggctttggtatttgacatcaccaagctactgctggctgtcttcggacccctttggattcttcaggccagtctgctcaaagtgcctacttcgtgcgcgttcaaggccttctccggatctgcgcgctagtgcgcaaggtggccggaggccattacgtgcagatggtcatcatcaagatgggggcgcttgttggcacttatgtctataaccatctcactcctcttcggactgggcgcacaacggcctgcaagatctggccgtggctgtagagccagtcgtcttctcccaaatggagaccaagctcatcacgtggggggcggacaccgccgcgtgcggtgacatcatcgacggcttcccgtctccgcccgcaggggccgagagatactgctcggaccggctgatgggatggtctcaaaggggtggaggttgctggcgcccatcacggcgtatgcccagcagacaaggggcctcttgggatgcataatcaccagcctgccggccgggacaaaaaccaggtggagggtgaggttcaaattgtgtcaattgctacccagaccttcctggcgacctgcatcaacggggtgtgctggactgtctaccacggggccggaacaaggaccatgcgtcgcccaagggccctgtcatccaaatgtataccaatgtggaccaagatctcgtaggctggcccgctccccaaggcgcccgctcattgacaccctgcgcttgtggctcctcggacctttacctggtcacgaggcacgccatgtcattcctgtgcgcaggcggggtgatagcagaggcagcctgctttcgccccggcccatctcttacttgaaaggctcctcggggggcccgctgctgtgccccgcgggacacgccgtaggcatattagagctgcggtgtgcactcgtggagtggccaaggcggtggacttcatccccgtagagagcttggaaacaaccatgaggtctccggtgttcacagacaactcttctccaccagcagtgccccagtgcttccaagtggcccactacatgctcccaccggcagcggtaagagtaccaaggtcccggccgcgtacgcggctcagggctacaaggtgctggtgctcaacccctccgttgctgcaacgctgggctttggtgcttacatgtccaagcccatgggattgatcctaacatcaggactggggtgaggacaattactactggcagccccatcacgtactccacctacggcaagtttcttgccgacggcgggtgctcagggggcgcttatgacataataatttgtgacgaggccactccacggatgcaacatccatcttgggcatcggcactgtccttgaccaagcagagactgcgggggcgagactggttgtgctcgccaccgctacccctccgggttccgtcaccgtgccccacccaacatcgaggaggttgctctgtccaccaccggagagattcctttttatggcaaggctatcccccttgagacaatcaagggggggagacatctcattttttgccactcaaagaagaagtgcgacgagctcgctgcaaagctgtcgcgatgggcgtcaacgccgtggcctactaccgcggccttgacgtgtccgtcatcccgaccagcggcgatgttgtcgtcgtggcaactgatgctctcatgaccggctttaccggcgacttcgactcgtgatagattgcaacacgtgtgtcacccagacagtcgacttcagccttgatcctaccttcaccattgagacgaccacgctcccccaggacgccgtctcccgcactcaacgtcgggggaggactggcagggggaagccaggctctacagatttgtggcaccgggggaacgcccttccggcatgttcgactcgtccgtcctctgcgagtgctatgacgcgggctgtgcttggtatgaactcacacccgccgagaccacagttaggctgcggcgtacatgaacaccccggggctccccgtgtgccaagaccatcttgaattttgggagggcgtctttacgggtctcacccacatagacgcccacttcctatctcagacaaagcagagtggggaaaaccttccttacctggtacgtaccaagccaccgtgtgcgctagggcccaagcccctcctccatcgtgggaccaaatgtggaagtgcctgatccgcctcaagcccacccttcatgggccgacacctctgctatacagactgggtgcgttcagaatgaggtcaccctgacacacccagtcaccaagtacatcatgacatgcatgtcggct

SEQ ID NO: 553 - DNA, 4873 bp, Hepatitis C virus
caaccgtcgcccacaggacgtcaagttcccgggtggcggtcagatcgttggtggagtttatttgttgccgcgcaggggccctagattgggtgtgcgcgcgacgaggaagacttccgagcggtcgcaactcgaggtagacgtcagcctatccccaaggcgcgtcggcccgagggcaggacctgggctcagcccgggtacccttggcccctctatggcaatgagggctgcgggtgggcgggatggctcctgtcccccgtggctctcggcctagctggggccccacagacccccggcgtaggtcgcgcaatttgggtaaggtcatcgataccctcacgtgcggcttcgccgacctcatggggtacattccgctcgtcggcgcccctcttggaggcgctccagggccctggcgcatggcgtccgggttctggaagacggcgtgaactatgcaacagggaatcttcccggttgctctttctctatcttccttctggctctgctctcttgcctgaccgtgcccgcgtcgcctaccaagtacgcaactcctcgggcctttatcatgtcaccaatgattgccccaactcgagtattgtgtacgagacggccgataccatcctacattctccggggtgtgtcccttgcgttcgcgagggtaacacctcaaaagttgggtgccagtgtcccccacagtggccaccagggacggcaaactccccgcgacgcagcttcgacgtcacatcgatctgcttgtcgggagtgccaccctctgttcagccctatatgtgggggactttgcgggtctgtctttcttgtcggtcaactgttcactttctcccccaggcgccactggacaacgcaagactgcaactgctctatctaccccggccatataacgggtcaccgcatggcatgggatatgatgatgaactggtccctacaacagcgctggtagtagctcagctgctcagggttccgcaagccatcttggatatgatcgcgggtgcccactggggggtcctagcgggcatagcgtatttttccatggtggggaactgggcgaagtcctggtagtgctgttgctgtttgccagcgtcgatgcggaaacccgcaccaccggggggagtgctgctcacaccacgtttggactcgccagtttattcaatccgggccccagccagaaaatccagctgattaacagcaacgcagttggcacatcaatcgcacagccttgaactgtaatgcgagcctcgacactggctgggtggcggggctcctctattaccacaagttcaactcttcgggctgcaccgagaggatggccagctgtagccccttgccaatttcgcccagggctggggccctatcagctacgccaacggaagcggtcccgaacaccgcccctactgctggcactaccctccaaaaccttgtggtatcgtgccagcgctgaatgtatgtggcccagtgtacgcttcactcccagccccgtggtagtggggacgaccgacaagttgggcgcgcccacctacaaatggggtgccaatgagacggacgtcttcattcttaataacaccaggccaccgttgggcaattggttggttgcacctggatgaattcatctggatttaccaaagtgtgcggagcgcctccttgtaacatcggagggatgggcaacaacaccttgcactgccccactgattgtttccgcaagcatccggaagccacatactctcggtgtgctccggcccctggctcacgcccaggtgcttggtccactatgcttataggctttggcattatccttgtaccgtcaactacaccatgttcaaagtcaggatgtacgtgggaggggtcgagcacaggctgacgtggcctgcaactggacgcggggcgaaccttgtgatctggacgacagggacaggtccgagctcagcccgctgctgctgtccaccacacagtggcaggtccttccgtgctccttcacgaccctgccagccttgactaccgcctcatccacctccaccagaatatcgtggacgtgcaatacttgtacggggtggggtcgagcattgtgtcctgggccatcaagtgggagtacgtcatcctcttgtttctcctgcttgcagacgcgcgatctgctcctgcttgtggatgatgttgctcatatcccaagcggaggcagctttggaaaatcttgtattgctcaatgcggcgtctctggccgggacgcacggtcttgtgtccttcctcgtgtttttctgctttgcatggtattgaagggtaggtgggtgcccggggtggcctacgcctgctacgggatgtggcccttcctcctgctcctgttggcgttgccccaacgggcatacgcgctggacacggagatggccgcgtcgtgtggcggattgttcttgccgggttaatggcgctgactctgtcaccgcattacaagcgctatatcagctggtgcttatggtggcttcagtatttcctgactagagtagaagcgcaactgcacgtgtgggttccccccctcaacgttcgagggggcgcgacgctgtcatcctactcatgtgtgttgtacacccggctttggtatttgacatcaccaagctactgctggctgtcttcggacccctttggattcttcaggccagtctgctcaaagtgcctacttcgtgcgcgttcaaggccttctccggatctgcgcgctagtgcgcaaggtggccggaggccattacgtgcagatggtcatcatcaagatgggggcgcttgttggcacttatgtctataaccatctcactcctcttcggactgggcgcacaacggcctgcaagatctggccgtggctgtagagccagtcgtcttctcccaaatggagaccaagctcatcacgtggggggcggacaccgccgcgtgcggtgacatcatcgacggcttcccgtctccgcccgcaggggccgagagatactgctcggaccggctgatgggatggtctcaaaggggtggaggttgctggcgcccatcacggcgtatgcccagcagacaaggggcctcttgggatgcataatcaccagcctgccggccgggacaaaaaccaggtggagggtgaggttcaaattgtgtcaactgctacccagaccttcctggcgacctgcatcaacggggtgtgctggactgtctaccacggggccggaacaaggaccatgcgtcgcccaagggccctgtcatccaaatgtataccaatgtggaccaagatctcgtaggctggcccgctccccaaggcgcccgctcattgacaccctgcgcttgtggctcctcggacctttacctggtcacgaggcacgccatgtcattcctgtgcgcaggcggggtgatagcagaggcagcctgctttcgccccggcccatctcttacttgaaaggctcctcggggggcccgctgctgtgccccgcgggacacgccgtaggcatattagagctgcggtgtgcactcgtggagtggccaaggcggtggacttcatccccgtagagagcttggaaacaaccatgaggtctccggtgttcacagacaactcttctccaccagcagtgccccagtgcttccaagtggcccactacatgctcccaccggcagcggtaagagtaccaaggtcccggccgcgtacgcggctcagggctacaaggtgctggtgctcaacccctccgttgctgcaacgctgggctttggtgcttacatgtccaagcccatgggattgatcctaacatcaggactggggtgaggacaattactactggcagccccatcacgtactccacctacggcaagtttcttgccgacggcgggtgctcagggggcgcttatgacataataatttgtgacgaggccactccacggatgcaacatccatcttgggcatcggcactgtccttgaccaagcagagactgcgggggcgagactggttgtgctcgccaccgctacccctccgggttccgtcaccgtgccccacccaacatcgaggaggttgctctgtccaccaccggagagattcctttttatggcaaggctatcccccttgagacaatcaagggggggagacatctcattttttgccactcaaagaagaagtgcgacgagctcgctgcaaagctgtcgcgatgggcgtcaacgccgtggcctactaccgcggccttgacgtgtccgtcatcccgaccagcggcgatgttgtcgtcgtggcaactgatgctctcatgaccggctttaccggcgacttcgactcgtgatagattgcaacacgtgtgtcacccagacagtcgacttcagccttgatcctaccttcaccattgagacgaccacgctcccccaggacgccgtctcccgcactcaacgtcgggggaggactggcagggggaagccaggctctacagatttgtggcaccgggggaacgcccttccggcatgttcgactcgtccgtcctctgcgagtgctatgacgcgggctgtgcttggtatgaactcacacccgccgagaccacagttaggctgcggcgtacatgaacaccccggggctccccgtgtgccaagaccatcttgaattttgggagggcgtctttacgggtctcacccacatagacgcccacttcctatctcagacaaagcagagtggggaaaaccttccttacctggtacgtaccaagccaccgtgtgcgctagggcccaagcccctcctccatcgtgggaccaaatgtggaagtgcctgatccgcctcaagcccacccttcatgggccgacacctctgctatacagactgggtgcgttcagaatgaggtcaccctgacacacccagtcaccaagtacatcatgacatgcatgtcggct

SEQ ID NO: 554 - DNA, 4873 bp, Hepatitis C virus
caaccgtcgcccacaggacgtcaagttcccgggtggcggtcagatcgttggtggagtttatttgttgccgcgcaggggccctagattgggtgtgcgcgcgacgaggaagacttccgagcggtcgcaactcgaggtagacgtcagcctatccccaaggcgcgtcggcccgagggcaggacctgggctcagcccgggtacccttggcccctctatggcaatgagggctgcgggtgggcgggatggctcctgtcccccgtggctctcggcctagctggggccccacagacccccggcgtaggtcgcgcaatttgggtaaggtcatcgataccctcacgtgcggcttcgccgacctcatggggtacattccgctcgtcggcgcccctcttggaggcgctccagggccctggcgcatggcgtccgggttctggaagacggcgtgaactatgcaacagggaatcttcccggttgctctttctctatcttccttctggctctgctctcttgcctgaccgtgcccgcgtcgcctaccaagtacgcaactcctcgggcctttatcatgtcaccaatgattgccccaactcgagtattgtgtacgagacggccgataccatcctacattctccggggtgtgtcccttgcgttcgcgagggtaacacctcaaaagttgggtgccagtgtcccccacagtggccaccagggacggcaaactccccgcgacgcagcttcgacgtcacatcgatctgcttgtcgggagtgccaccctctgttcagccctatatgtgggggactttgcgggtctgtctttcttgtcggtcaactgttcactttctcccccaggcgccactggacaacgcaagactgcaactgctctatctaccccggccatataacgggtcaccgcatggcatgggatatgatgatgaactggtccctacaacagcgctggtagtagctcagctgctcagggttccgcaagccatcttggatatgatcgcgggtgcccactggggggtcctagcgggcatagcgtatttttccatggtggggaactgggcgaagtcctggtagtgctgttgctgtttgccagcgtcgatgcggaaacccgcaccaccggggggagtgctgctcacaccacgtttggactcgccagtttattcaatccgggccccagccagaaaatccagctgattaacagcaacgcagttggcacatcaatcgcacagccttgaactgtaatgcgagcctcgacactggctgggtggcggggctcctctattaccacaagttcaactcttcgggctgcaccgagaggatggccagctgtagccccttgccaatttcgcccagggctggggccctatcagctacgccaacggaagcggccccgaacaccgcccctactgctggcactaccctccaaaaccttgtggtatcgtgccagcgctgaatgtatgtggcccagtgtacgcttcactcccagccccgtggtagtggggacgaccgacaagttgggcgcgcccacctacaaatggggtgccaatgagacggacgtcttcattcttaataacaccaggccaccgttgggcaattggttggttgcacctggatgaattcatctggatttaccaaagtgtgcggagcgcctccttgtaacatcggagggatgggcaacaacaccttgcactgccccactgattgtttccgcaagcatccggaagccacatactctcggtgtgctccggcccctggctcacgcccaggtgcttggtccactatgcttataggctttggcattatccttgtaccgtcaactacaccatgttcaaagtcaggatgtacgtgggaggggtcgagcacaggctgacgtggcctgcaactggacgcggggcgaaccttgtgatctggacgacagggacaggtccgagctcagcccgctgctgctgtccaccacacagtggcaggtccttccgtgctccttcacgaccctgccagccttgactaccgcctcatccacctccaccagaatatcgtggacgtgcaatacttgtacggggtggggtcgagcattgtgtcctgggccatcaagtgggagtacgtcatcctcttgtttctcctgcttgcagacgcgcgatctgctcctgcttgtggatgatgttgctcatatcccaagcggaggcagctttggaaaatcttgtattgctcaatgcggcgtctctggccgggacgcacggtcttgtgtccttcctcgtgtttttctgctttgcatggtattgaagggtaggtgggtgcccggggtggcctacgcctgctacgggatgtggcccttcctcctgctcctgttggcgttgccccaacgggcatacgcgctggacacggagatggccgcgtcgtgtggcggattgttcttgccgggttaatggcgctgactctgtcaccgcattacaagcgctatatcagctggtgcttatggtggcttcagtatttcctgactagagtagaagcgcaactgcacgtgtgggttccccccctcaacgttcgagggggcgcgacgctgtcatcctactcatgtgtgttgtacacccggctttggtatttgacatcaccaagctactgctggctgtcttcggacccctttggattcttcaggccagtctgctcaaagtgcctacttcgtgcgcgttcaaggccttctccggatctgcgcgctagtgcgcaaggtggccggaggccattacgtgcagatggtcatcatcaagatgggggcgcttgttggcacttatgtctataaccatctcactcctcttcggactgggcgcacaacggcctgcaagatctggccgtggctgtagagccagtcgtcttctcccaaatggagaccaagctcatcacgtggggggcggacaccgccgcgtgcggtgacatcatcgacggcttcccgtctccgcccgcaggggccgagagatactgctcggaccggctgatgggatggtctcaaaggggtggaggttgctggcgcccatcacggcgtatgcccagcagacaaggggcctcttgggatgcataatcaccagcctgccggccgggacaaaaaccaggtggagggtgaggttcaaattgtgtcaactgctacccagaccttcctggcgacctgcatcaacggggtgtgctggactgtctaccacggggccggaacaaggaccatgcgtcgcccaagggccctgtcatccaaatgtataccaatgtggaccaagatctcgtaggctggcccgctccccaaggcgcccgctcattgacaccctgcgcttgtggctcctcggacctttacctggtcacgaggcacgccatgtcattcctgtgcgcaggcggggtgatagcagaggcagcctgctttcgccccggcccatctcttacttgaaaggctcctcggggggcccgctgctgtgccccgcgggacacgccgtaggcatattagagctgcggtgtgcactcgtggagtggccaaggcggtggacttcatccccgtagagagcttggaaacaaccatgaggtctccggtgttcacagacaactcttctccaccagcagtgccccagtgcttccaagtggcccactacatgctcccaccggcagcggtaagagtaccaaggtcccggccgcgtacgcggctcagggctacaaggtgctggtgctcaacccctccgttgctgcaacgctgggctttggtgcttacatgtccaagcccatgggattgatcctaacatcaggactggggtgaggacaattactactggcagccccatcacgtactccacctacggcaagtttcttgccgacggcgggtgctcagggggcgcttatgacataataatttgtgacgaggccactccacggatgcaacatccatcttgggcatcggcactgtccttgaccaagcagagactgcgggggcgagactggttgtgctcgccaccgctacccctccgggttccgtcaccgtgccccacccaacatcgaggaggttgctctgtccaccaccggagagattcctttttatggcaaggctatcccccttgagacaatcaagggggggagacatctcattttttgccactcaaagaagaagtgcgacgagctcgctgcaaagctgtcgcgatgggcgtcaacgccgtggcctactaccgcggccttgacgtgtccgtcatcccgaccagcggcgatgttgtcgtcgtggcaactgatgctctcatgaccggctttaccggcgacttcgactcgtgatagattgcaacacgtgtgtcacccagacagtcgacttcagccttgatcctaccttcaccattgagacgaccacgctcccccaggacgccgtctcccgcactcaacgtcgggggaggactggcagggggaagccaggctctacagatttgtggcaccgggggaacgcccttccggcatgttcgactcgtccgtcctctgcgagtgctatgacgcgggctgtgcttggtatgaactcacacccgccgagaccacagttaggctgcggcgtacatgaacaccccggggctccccgtgtgccaagaccatcttgaattttgggagggtgtctttacgggtctcacccacatagacgcccacttcctatctcagacaaagcagagtggggaaaaccttccttacctggtacgtaccaagccaccgtgtgcgctagggcccaagcccctcctccatcgtgggaccaaatgtggaagtgcctgatccgcctcaagcccacccttcatgggccgacacctctgctatacagactgggtgcgttcagaatgaggtcaccctgacacacccagtcaccaagtacatcatgacatgcatgtcggct

SEQ ID NO: 555 - DNA, 4873 bp, Hepatitis C virus; identical to SEQ ID NO: 524

SEQ ID NO: 556 - DNA, 4873 bp, Hepatitis C virus; identical to SEQ ID NO: 524

SEQ ID NO: 557 - DNA, 4873 bp, Hepatitis C virus; identical to SEQ ID NO: 524

SEQ ID NO: 558 - DNA, 4873 bp, Hepatitis C virus
caaccgtcgcccacaggacgttaagttcccgggtggcggtcagatcgttggtggagtttacttgttgccgcgcaggggccctagattgggtgtgcgcgcgacgaggaagacttccgagcggtcgcaactcgcggtagacgtcagcctatccccaaggcgcgtcggcccgagggcaggacctgggctcagcccgggtacccctggcccctctacggcaatgagggctgcgggtgggcgggatggctcctgtcccccgtggctctcggcctagctggggccccacagacccccggcgtaggtcgcgcaatttgggtaaggtcatcgacaccctcacgtgcggcttcgccgacctcatggggtacattccgctcgtcggcgcccctcttgggggcgctccagggccctggcgcatggcgtccgggtcctggaagacggcgtgaattatgcaacagggaaccttcctggttgctctttttctatcttccttctggccctgctctcttgcctgaccgtgcccgcgtcgcctatcaagtacgcaactcctcgggcctctaccatgtcaccaatgattgccctaactcgagtattgtgtacgagacggccgataccattctacattctccggggtgtgtcccttgcgttcgcgagggtaacgcctcgaaagttgggtggcggtggcccccacagtcgccaccagggatggcagactccccacaacgcagcttcgacgtcacatcgatctgcttgtcgggagcgccaccctctgctcggccctctatgtgggggactttgcgggtctgtcttccttgtcggtcaactgttcactttctcccccaggcgccactggacaacgcaagactgcaactgttctatctaccccggccatataacgggtcaccgcatggcatgggatatgatgatgaactggtccctacagcagcgctggtagtagctcagctgctcagggtcccgcaagccatcttggacatgatcgctggtgcccactggggagtcctagcgggcatagcgtatttctccatggtggggaactgggcgaagtcttagtggtgctgttgctgtttgccggcgttgatgcgggaacccacatcaccggggggagtgtcgctcattccacggcacgactcaccggtcttttcagtcgtggctcccagcagcatatccagctgatcaacaccaacgcagttggcacatcaatcgcacggccctgaactgtaatgaaagcctcaacactggctggctagcggggctcttctattccaacaaattcaactcttcaggctgccccgagaggttggccagctgtagccccttgccgatttcgaccagggctggggtcctatcagctacgccaacggaagcggccccgaccaccggccctactgctggcactaccccccaaagccttgtggtatcgtgccagcacagagcgtatgtggcccagtgtatgcttcacacccagccccgtggtggtgggaacgaccaacaagttgggcgcgcctacctacaactggggttgcaatgatacggacgtcttcgtccttaataacaccaggccgccgttgggcaattggttggttgcacctggatgaactcatctggatttaccaaagtgtgcggagcgcctccttgtgtcatcggaggggggggcaacaacaccttgcactgccccactgactgtttccgcaagcatccggaagccacatactctcggtgtgctccggtccctggatcacgcccaggtgcctggtccactatccttataggctttggcattatccttgtactgtcaactacaccatgttcaaagtcaggatgtacgtgggaggggtcgagcacaggctgacgttgcttgcaactggacgcggggcgagcgttgcgatctggacgacagggacaggtccgagctcagcccgctgctgctgtccaccacacagtggcaggtccttccgtgttcctttaccaccttgccagccttgactaccgcctcatccacctccaccagaacatcgtggatgtgcaatacttgtacggggtggggtcaagcattgtgtcctgggccatcaagtgggaatacgtcatcctcttatttctcctgcttgcagacgcgcgatctgctcctgcttgtggatgatgctactcatatcccaagcggaggcagcgttggagaaccttgtgttgctcaacgcggcgtctctggccgggacgcatggccttgcgtccttcctcgtgtttttctgctttgcatggtattgaagggtaagtgggcgcccggagcagcctacgccttctacgggatgtggcctctcctcctgctcctgttggcgttgccccagcgggcatacgcgctggacacggagatggccgcgtcgtgtggcgggttgttattgtcgggttaatggcgctgactctgtcaccgcactacaagcgctacatcagctggtgcttgtggtggcttcagtatttcttgaccagagtagaagcgcaactgcacgtgtgggttccccccctcaacgtccgggggggcgtgacgctgtcatcctactcatgtgtgctgtacacccggctttggtatttgacatcaccaagctgctgttggccgtcttcggccctctttggattcttcaaaccagtctgctcaaagtgcctatttcgtgcgcgttcaaggccttctccggatctgcgcgctagcgcgcaagatggccggcggccattacgtgcaaatggccatcatcaagatgggggcgcttactggcacctatgtttataaccatctcactcctcttcggactgggcgcacaacggcctacgagatctggccgtggctgtagagccagtcgtcttctcccagatggagaccaagctcatcacgtggggggcggacaccgccgcgtgcggtgacatcatcaacggcttcccgtctctgcccgtaggggccgagagatactgctcggaccggccgatggaatggtctccaaggggtggaggttgctggcgcccatcacggcgtatgcccagcagacaaggggcctcttgggatgcataataaccagcctgccggccgggacaaaaaccaggtggagggtgaggttcagattgtgtcaactgctgcccagacctttctggcaacctgcatcaacggggtgtgctggactgtctaccacggggccggaacaaggaccatgcatcacccaaaggtcctgttatccagatgtacaccaatgtagaccaagacctcgtaggctggcccgctccccaaggtgcccgctcattgacaccctgcacttgcggctcctcggacctttacctggtcacgaggcacgccatgtcattcccgtacgccgacggggtgatagcaggggcagcctgctttcgccccggcctatctcttacttgaaaggctcctcggggggtccactactgtgccccgcgggacacgccgtaggcatattagggccgcggtgtgcacccgtggagtggctaaggcggtggactttatccccgtagagagcctagagacaaccatgaggtccccggtgttcacagacaattcctccccaccagcagtgccccagagcttccaggtggctcactgcatgctcccaccggcagcggtaagagcaccaaggtcccggccgcatacgcggctcaggggtacaaggtgttggtgctcaacccctccgttgctgcaacactgggttttggtgcctacatgtccaagcccatggggttgatcctaacatcaggactggggtgaggacaattactactggcagctccatcacgtactccacctacggcaagttcctcgccgacggcgggtgctcggggggtgcttatgacataataatttgtgacgaggccactccacggatgcaacatctatcttgggcatcggcaccgtccttgaccaagcagagactgcgggggcgagactggttgtgctcgccaccgctactcctccgggctccgtcaccgtgccccatccaacatcgaggaggttgctctgtctaccaccggagagatccccttttacggcaaggctatcccccttgaggcaatcaagggagggagacatctcattttctgccactcaaagaagaagtgcgacgagctcgccgcaaaactgtcgcgatgggcatcaatgccgtggcttactaccgcggccttgacgtgtccgtcatcccgaccagtggcgacgttgtcgttgtggcaactgatgctctcatgaccggctataccggcgacttcgactcgtgatagactgcaacacgtgtgtcacccagacagtcgacttcagccttgaccctaccttcaccattgagacaaccacacttcctcaggacgctgtctcccgcacccaacgtcggggcaggactggcagggggaagccaggctctacagatttgtggcaccgggagagcgcccttccggcatgttcgactcgtccgtcctctgtgagtgctatgacgcaggctgtgcttggtatgagctcacacccgccgagaccacagtcaggctacggcatacatgaacactccggggcttcccgtgtgccaagaccatcttgaattttgggagggcgtcttcacgggtctcacccatatagacgcccacttcctatctcagacaaagcagagtggggaaaactttccttacctggtacgtaccaagccaccgtgtgcgctagagctcaagctccccccccatcgtgggaccagatgtggaagtgcttgatccgcctcaaacccaccctccatgggccaacacctctgctatacaggctgggcgcgttcagaatgaagtcaccctgacgcacccaatcaccaagtacatcatgacatgcatgtcggct

SEQ ID NO: 559 - DNA, 4873 bp, Hepatitis C virus
caaccgtcgcccacaggacgttaagttcccgggtggcggtcagatcgttggtggagtttacttgttgccgcgcaggggccctagattgggtgtgcgcgcgacgaggaagacttccgagcggtcgcaactcgcggtagacgtcagcctatccccaaggcgcgtcggcccgagggcaggacctgggctcagcccgggtacccctggcccctctacggcaatgagggctgcgggtgggcgggatggctcctgtcccccgtggctctcggcctagctggggccccacagacccccggcgtaggtcgcgcaatttgggtaaggtcatcgacaccctcacgtgcggcttcgccgacctcatggggtacattccgctcgtcggcgcccctcttgggggcgctccagggccctggcgcatggcgtccgggtcctggaagacggcgtgaattatgcaacagggaaccttcctggttgctctttttctatcttccttctggccctgctctcttgcctgaccgtgcccgcgtcgcctatcaagtacgcaactcctcgggcctctaccatgtcaccaatgattgccctaactcgagtattgtgtacgagacggccgataccattctacattctccggggtgtgtcccttgcgttcgcgagggtaacgcctcgaaagttgggtggcggtggcccccacagtcgccaccagggatggcagactccccacaacgcagcttcgacgtcacatcgatctgcttgtcgggagcgccaccctctgctcggccctctatgtgggggactttgcgggtctgtcttccttgtcggtcaactgttcactttctcccccaggcgccactggacaacgcaagactgcaactgttctatctaccccggccatataacgggtcaccgcatggcatgggatatgatgatgaactggtccctacagcagcgctggtagtagctcagctgctcagggtcccgcaagccatcttggacatgatcgctggtgcccactggggagtcctagcgggcatagcgtatttctccatggtggggaactgggcgaagtcttagtggtgctgttgctgtttgccggcgttgatgcgggaacccacatcaccggggggagtgtcgctcattccacggcacgactcaccggtcttttcagtcgtggctcccagcagcatatccagctgatcaacaccaacgcagttggcacatcaatcgcacggccctgaactgtaatgaaagcctcaacactggctggctagcggggctcttctattccaacaaattcaactcttcaggctgccccgagaggttggccagctgtagccccttgccgatttcgaccagggctggggtcctatcagctacgccaacggaagcggccccgaccaccggccctactgctggcactaccccccaaagccttgtggtatcgtgccagcacagagcgtatgtggcccagtgtatgcttcacacccagccccgtggtggtgggaacgaccaacaagttgggcgcgcctacctacaactggggttgcaatgatacggacgtcttcgtccttaataacaccaggccgccgttgggcaattggttggttgcacctggatgaactcatctggatttaccaaagtgtgcggagcgcctccttgtgtcatcggaggggggggcaacaacaccttgcactgccccactgactgtttccgcaagcatccggaagccacatactctcggtgtgctccggtccctggatcacgcccaggtgcctggtccactatccttataggctttggcattatccttgtactgtcaactacaccatgttcaaagtcaggatgtacgtgggaggggtcgagcacaggctgacgttgcttgcaactggacgcggggcgagcgttgcgatctggacgacagggacaggtccgagctcagcccgctgctgctgtccaccacacagtggcaggtccttccgtgttcctttaccaccttgccagccttgactaccgcctcatccacctccaccagaacatcgtggatgtgcaatacttgtacggggtggggtcaagcattgtgtcctgggccatcaagtgggaatacgtcatcctcttatttctcctgcttgcagacgcgcgatctgctcctgcttgtggatgatgctactcatatcccaagcggaggcagcgttggagaaccttgtgttgctcaacgcggcgtctctggccgggacgcatggccttgcgtccttcctcgtgtttttctgctttgcatggtattgaagggtaagtgggcgcccggagcagcctacgccttctacgggatgtggcctctcctcctgctcctgttggcgttgccccagcgggcatacgcgctggacacggagatggccgcgtcgtgtggcgggttgttattgtcgggttaatggcgctgactctgtcaccgcactacaagcgctacatcagctggtgcttgtggtggcttcagtatttcttgaccagagtagaagcgcaactgcacgtgtgggttccccccctcaacgtccgggggggcgtgacgctgtcatcctactcatgtgtgctgtacacccggctttggtatttgacatcaccaagctgctgttggccgtcttcggccctctttggattcttcaaaccagtctgctcaaagtgcctatttcgtgcgcgttcaaggccttctccggatctgcgcgctagcgcgcaagatggccggcggccattacgtgcaaatggccatcatcaagatgggggcgcttactggcacctatgtttataaccatctcactcctcttcggactgggcgcacaacggcctacgagatctggccgtggctgtagagccagtcgtcttctcccagatggagaccaagctcatcacgtggggggcggacaccgccgcgtgcggtgacatcatcaacggcttcccgtctctgcccgtaggggccgagagatactgctcggaccggccgatggaatggtctccaaggggtggaggttgctggcgcccatcacggcgtatgcccagcagacaaggggcctcttgggatgcataataaccagcctgccggccgggacaaaaaccaagtggagggtgaggttcagattgtgtcaactgctgcccagacctttctggcaacctgcatcaacggggtgtgctggactgtctaccacggggccggaacaaggaccatgcatcacccaaaggtcctgttatccagatgtacaccaatgtagaccaagacctcgtaggctggcccgctccccaaggtgcccgctcattgacaccctgcacttgcggctcctcggacctttacctggtcacgaggcacgccatgtcattcccgtacgccgacggggtgatagcaggggcagcctgctttcgccccggcctatctcttacttgaaaggctcctcggggggtccactactgtgccccgcgggacacgccgtaggcatattagggccgcggtgtgcacccgtggagtggctaaggcggtggactttatccccgtagagagcctagagacaaccatgaggtccccggtgttcacagacaattcctccccaccagcagtgccccagagcttccaggtggctcactgcatgctcccaccggcagcggtaagagcaccaaggtcccggccgcatacgcggctcaggggtacaaggtgttggtgctcaacccctccgttgctgcaacactgggttttggtgcctacatgtccaagcccatggggttgatcctaacatcaggactggggtgaggacaattactactggcagctccatcacgtactccacctacggcaagttcctcgccgacggcgggtgctcggggggtgcttatgacataataatttgtgacgaggccactccacggatgcaacatctatcttgggcatcggcaccgtccttgaccaagcagagactgcgggggcgagactggttgtgctcgccaccgctactcctccgggctccgtcaccgtgccccatccaacatcgaggaggttgctctgtctaccaccggagagatccccttttacggcaaggctatcccccttgaggcaatcaagggagggagacatctcattttctgccactcaaagaagaagtgcgacgagctcgccgcaaaactgtcgcgatgggcatcaatgccgtggcttactaccgcggccttgacgtgtccgtcatcccgaccagtggcgacgttgtcgttgtggcaactgatgctctcatgaccggctataccggcgacttcgactcgtgatagactgcaacacgtgtgtcacccagacagtcgacttcagccttgaccctaccttcaccattgagacaaccacacttcctcaggacgctgtctcccgcacccaacgtcggggcaggactggcagggggaagccaggctctacagatttgtggcaccgggagagcgcccttccggcatgttcgactcgtccgtcctctgtgagtgctatgacgcaggctgtgcttggtatgagctcacacccgccgagaccacagtcaggctacggcatacatgaacactccggggcttcccgtgtgccaagaccatcttgaattttgggagggcgtcttcacgggtctcacccatatagacgcccacttcctatctcagacaaagcagagtggggaaaactttccttacctggtacgtaccaagccaccgtgtgcgctagagctcaagctccccccccatcgtgggaccagatgtggaagtgcttgatccgcctcaaacccaccctccatgggccaacacctctgctatacaggctgggcgcgttcagaatgaagtcaccctgacgcacccaatcaccaagtacatcatgacatgcatgtcggct

SEQ ID NO: 560 - DNA, 4873 bp, Hepatitis C virus
caaccgtcgcccacaggacgtcaagttcccgggtggcggtcagatcgttggtggagtttacttgttgccgcgcaggggccctagattgggtgtgcgcgcgacgaggaagacttccgagcggtcgcaactcgaggtagacgtcagcctatccccaaggcgcgtcggcccgagggcaggacctgggctcagcccgggtacccttggcccctctatggcaatgagggctgcgggtgggcgggatggctcctgtcccccgtggctctcggcctagctggggccccacagacccccggcgtaggtcgcgcaatttgggtaaggtcatcgataccctcacgtgcggcttcgccgacctcatggggtacattccgctcgtcggcgcccctcttggaggcgctccagggccctggcgcatggcgtccgggttctggaagacggcgtgaactatgcaacagggaatcttcccggttgctctttctctatcttccttctggttctgctctcttgcctgaccgtgcccgcgtcgcctaccaagtacgcaactcctcgggcctttatcatgtcaccaatgattgccccaactcgagtattgtgtacgagacggccgataccatcctacattctccggggtgtgtcccttgcgttcgcgagggtaacacctcaaaagttgggtgccagtgtcccccacagtggccaccagggacggcaaactccccgcgacgcagcttcgacgtcacatcgatctgcttgtcgggagtgccaccctctgttcagccctatatgtgggggactttgcgggtctgtctttcttgtcggtcaactgttcactttctcccccaggcgccactggacaacgcaagactgcaactgctctatctaccccggccatataacgggtcaccgcatggcatgggatatgatgatgaactggtccctacaacagcgctggtagtagctcagctgctcagggttccgcaagccatcttggatatgatcgcgggtgcccactggggggtcctagcgggcatagcgtatttttccatggtggggaactgggcgaagtcctggtagtgctgttgctgtttgccagcgtcgatgcggaaacccgcaccaccggggggagtgctgctcacaccacgtttggactcgccagtttattcaatccgggccccagccagaaaatccagctgattaacagcaacgcagttggcacatcaatcgcacagccttgaactgtaatgcgagcctcgacactggctgggtggcggggctcctctattaccacaagttcaactcttcgggctgcaccgagaggatggccagctgtagccccttgccaatttcgcccagggctggggccctatcagctacgccaacggaagcggccccgaacaccgcccctactgctggcactaccctccaaaaccttgtggtatcgtgccagcgctgaatgtatgtggcccagtgtacgcttcactcccagccccgtggtagtggggacgaccgacaagttgggcgcgcccacctacaaatggggtgccaatgagacggacgtcttcattcttaataacaccaggccaccgttgggcaattggttggttgcacctggatgaattcatctggatttaccaaagtgtgcggagcgcctccttgtaacatcggagggatgggcaacaacaccttgcactgccccactgattgtttccgcaagcatccggaagccacatactctcggtgtgctccggcccctggctcacgcccaggtgcttggtccactatgcttataggctttggcattatccttgtaccgtcaactacaccatgttcaaagtcaggatgtacgtgggaggggtcgagcacaggctgacgtggcctgcaactggacgcggggcgaaccttgtgatctggacgacagggacaggtccgagctcagcccgctgctgctgtccaccacacagtggcaggtccttccgtgctccttcacgaccctgccagccttgactaccgcctcatccacctccaccagaatatcgtggacgtgcaatacttgtacggggtggggtcgagcattgtgtcctgggccatcaagtgggagtacgtcatcctcttgtttctcctgcttgcagacgcgcgatctgctcctgcttgtggatgatgttgctcatatcccaagcggaggcagctttggaaaatcttgtattgctcaatgcggcgtctctggccgggacgcacggtcttgtgtccttcctcgtgtttttctgctttgcatggtattgaagggtaggtgggtgcccggggtggcctacgcctgctacgggatgtggcccttcctcctgctcctgttggcgttgccccaacgggcatacgcgctggacacggagatggccgcgtcgtgtggcggattgttcttgccgggttaatggcgctgactctgtcaccgcattacaagcgctatatcagctggtgcttatggtggcttcagtatttcctgactagagtagaagcgcaactgcacgtgtgggttccccccctcaacgttcgagggggcgcgacgctgtcatcctactcatgtgtgttgtacacccggctttggtatttgacatcaccaagctactgctggctgtcttcggacccctttggattcttcaggccagtctgctcaaagtgcctacttcgtgcgcgttcaaggccttctccggatctgcgcgctagtgcgcaaggtggccggaggccattacgtgcagatggtcatcatcaagatgggggcgcttgttggcacttatgtctataaccatctcactcctcttcggactgggcgcacaacggcctgcaagatctggccgtggctgtagagccagtcgtcttctcccaaatggagaccaagctcatcacgtggggggcggacaccgccgcgtgcggtgacatcatcgacggcttcccgtctccgcccgcaggggccgagagatactgctcggaccggctgatgggatggtctcaaaggggtggaggttgctggcgcccatcacggcgtatgcccagcagacaaggggcctcttgggatgcataatcaccagcctgccggccgggacaaaaaccaggtggagggtgaggttcaaattgtgtcaactgctacccagaccttcctggcgacctgcatcaacggggtgtgctggactgtctaccacggggccggaacaaggaccatgcgtcgcccaagggccctgtcatccaaatgtataccaatgtggaccaagatctcgtaggctggcccgctccccaaggcgcccgctcattgacaccctgcgcttgtggctcctcggacctttacctggtcacgaggcacgccatgtcattcctgtgcgcaggcggggtgatagcagaggcagcctgctttcgccccggcccatctcttacttgaaaggctcctcggggggcccgctgctgtgccccgcgggacacgccgtaggcatattagagctgcggtgtgcactcgtggagtggccaaggcggtggacttcatccccgtagagagcttggaaacaaccatgaggtctccggtgttcacagacaactcttctccaccagcagtgccccagtgcttccaagtggcccactacatgctcccaccggcagcggtaagagtaccaaggtcccggccgcgtacgcggctcagggctacaaggtgctggtgctcaacccctccgttgctgcaacgctgggctttggtgcttacatgtccaagcccatgggattgatcctaacatcaggactggggtgaggacaattactactggcagccccatcacgtactccacctacggcaagtttcttgccgacggcgggtgctcagggggcgcttatgacataataatttgtgacgaggccactccacggatgcaacatccatcttgggcatcggcactgtccttgaccaagcagagactgcgggggcgagactggttgtgctcgccaccgctacccctccgggttccgtcaccgtgccccacccaacatcgaggaggttgctctgtccaccaccggagagattcctttttatggcaaggctatcccccttgagacaatcaagggggggagacatctcattttttgccactcaaagaagaagtgcgacgagctcgctgcaaagctgtcgcgatgggcgtcaacgccgtggcctactaccgcggccttgacgtgtccgtcatcccgaccagcggcgatgttgtcgtcgtggcaactgatgctctcatgaccggctttaccggcgacttcgactcgtgatagattgcaacacgtgtgtcacccagacagtcgacttcagccttgatcctaccttcaccattgagacgaccacgctcccccaggacgccgtctcccgcactcaacgtcgggggaggactggcagggggaagccaggctctacagatttgtggcaccgggggaacgcccttccggcatgttcgactcgtccgtcctctgcgagtgctatgacgcgggctgtgcttggtatgaactcacacccgccgagaccacagttaggctgcggcgtacatgaacaccccggggctccccgtgtgccaagaccatcttgaattttgggagggcgtctttacgggtctcacccacatagacgcccacttcctatctcagacaaagcagagtggggaaaaccttccttacctggtacgtaccaagccaccgtgtgcgctagggcccaagcccctcctccatcgtgggaccaaatgtggaagtgcctgatccgcctcaagcccacccttcatgggccgacacctctgctatacagactgggtgcgttcagaatgaggtcaccctgacacacccagtcaccaagtacatcatgacatgcatgtcggct

SEQ ID NO: 561 - DNA, 4872 bp, Hepatitis C virus
caaccgtcgcccacaggacgttaagttcccgggtggcggtcagatcgttggtggagttacttgttgccgcgcaggggccctagattgggtgtgcgcgcgacgaggaagacttccgagcggtcgcaactcgcggtagacgtcagcctatccccaaggcgcgtcggcccgagggcaggacctgggctcagcccgggtacccctggcccctctacggcaatgagggctgcgggtgggcgggatggctcctgtcccccgtggctctcggcctagctggggccccacagacccccggcgtaggtcgcgcaatttgggtaaggtcatcgacaccctcacgtgcggcttcgccgacctcatggggtacattccgctcgtcggcgcccctcttgggggcgctgcagggccctggcgcatggcgtccgggtcctggaagacggcgtgaattatgcaacagggaaccttcctggttgctctttttctatcttccttctggccctgctctcttgcctgaccgtgcccgcgtcgcctatcaagtacgcaactcctcgggcctctaccatgtcaccaatgattgccctaactcgagtattgtgtacgagacggccgataccattctacattctccggggtgtgtcccttgcgttcgcgagggtaacgcctcgaaatttgggtggcggtggcccccacagtcgccaccagggatggcagactccccacaacgcagcttcgacgtcacatcgatctgcttgtcgggagcgccaccctctgctcggccctctatgtgggggacttggcgggtctgtcttccttgtcggtcaactgttcactttctcccccaggcgccactggacaacgcaagactgcaactgttctatctaccccggccatataacgggtcaccgcatggcatgggatatgatgatgaactggtccctacagcagcgctggtagtagctcagctgctcagggtcccgcaagccatcttggacatgatcgctggtgcccactggggagtcctagcgggcatagcgtatttctccatggtggggaactgggcgaagtcttagtggtgctgttgctgtttgccggcgttgatgcgggaacccacatcaccggggggagtgtcgctcattccacggcacgactcaccggtcttttcagtcgtggctcccagcagcatatccagctgatcaacaccaacgcagttggcacatcaatcgcacggccctgaactgtaatgaaagcctcaacactggctggctagcggggctcttctattccaacaaattcaactcttcaggctgccccgagaggttggccagctgtagacccttgccgatttcgaccagggctggggtcctatcagctacgccaacggaagcggccccgaccaccggccctactgctggcactaccccccaaagccttgtggtatcgtgccagcacagagcgtatgtggcccagtgtattcttcacacccagccccgtggtggtgggaacgaccaacaagttgggcgcgcctacctacaactggggttgcaatgatacggacgtcttcgtccttaataacaccaggccgccgttgggcaattggttcgttgcacctggatgaactcatctggatttaccaaagtgtgcggagcgcctccttgtgtcatcggaggggggggcaacaacaccttgcactgccccactgactgtttccgcaagcatccggaagccacatactctcggtgtgctccggtccctggatcacgcccaggtgcctggtccactatccttataggctttggcattatccttgtactgtcaactacaccatgttcaaagtcaggatgtacgtgggaggggtcgagcacaggctgacgttgcttgcaactggacgcggggcgagcgttgcgatctggacgacagggacaggtccgagctcagcccgctgctgctgtccaccacacagtggcaggtccttccgtgttcctttaccaccttgccagccttgactaccgcctcatccacctccaccagaacatcgtggatgtgcaatacttgtacggggtggggtcaagcattgtgtcctgggccatcaagtgggaatacgtcatcctcttatttctcctgcttgcagacgcgcgctctgctcctgcttgtggatgatgctactcatatcccaagcggaggcagcgttggagaaccttgtgttgctcaacgcggcgtctctggccgggacgcatggccttgcgtccttcctcgtgtttttctgctttgcatggtatcgaagggtaagtgggcgcccggagcagcctacgccttctacgggatgtggcctctcctcctgctcctgttggcgttgccccagcgggcatacgcgctggacacggagatggccgcgtcgtgtggcggcttgttattgtcgggttaatggcgctgactctgtcaccgcactacaagcgctacatcagctggtgcttatggtggcttcagtatttcttgaccagagtagaagcgcaactgcacgtgtgggttccccccctcaacgtccgggggggcgtgacgctgtcatcctactcatgtgtgctgtacacccggcattggtatttgacatcaccaagctgctgttggccgtcttcggccctctttggattcttcaaaccagtctgctcaaagtgcccatttcgtgcgcgttcaaggccttctccggatctgcgcgctagcgcgcaagatggccggcggccattacgtgcaaatggccatcatcaagatgggggcgcttactggcacctatgtttataaccatctcactcctcttcgggctgggcgcacaacggcctacgagatctggccgtggctgtagagccagtcgtcttctcccagatggagaccaagctcatcacgtggggggcggacaccgccgcgtgcggtgacatcatcaacggcttgccgtctctgcccgtaggggccgagagatactgctcggaccggccgatggaatggtctccaaggggtggaggttgctggcgcccatcacggcgtatgcccagcagacaaggggcctcttgggatgcataataaccagcctgacggccgggacaaaaaccaggtggagggtgaggttcagattgtgtcaactgctgcccagacctttctggcaacctgcatcaacggggtgtgctggactgtctaccacggggccggaacaaggaccatccatcacccaaaggtcctgttatccagatgtacaccaatgtagaccaagacctcgtaggctggcccgctccccaaggtgcccgctcattgacaccctgcacttgcggctcctcggacctttacctggtcacgaggcacgccgtgtcattcccgtacgccgacggggtgatagcaggggcagcctgctttcgccccggcctatctcttacttgaaaggctcctcggggggtccactactgtgccccgcgggacacgccgtaggcatattcgggccgcggtgtgcacccgtggagtggctaaggcggtggactttatccccgtagagagcctagagacaaccatgaggtccccggtgttcacagacaattcctccccaccagcagtgccccagagcttccaggtggctcaccgcatgctcccaccggcagcggtaagagcaccaaggtcccggccgcatacgcggctcaggggtacaaggtgttggtgctcaacccctccgttgctgcaacactgggttttggtgcctacatgtccaagcccatggggttgatcctaacatcaggactggggtgaggacaattactactggcagctccatcacgtactccacctacggcaagttcctcgccgacggcgggtgctcggggggtgcttatgacataataatttgtgacgagtccactccacggatgcaacatctatcttgggcatcggcaccgtccttgaccaagcagagactgcgggggcgagactggttgtgctcgccaccgctactcctccgggctccgtcaccgtgccccatcctacatcgaggaggttgctctgtctaccaccggagagatccccttttacggcaaggctatcccccttgaggcaatcaagggagggagacatctcattttctgccactcaaagaagaagtgcgacgagctcgccgcaaaactggcgcgatgggcatcaatgccgtggcttactaccgcggccttgacgtgtccgtcatcccgaccagtggcgacgttgtcgttgtggcaactgatgctctcatgaccggctataccggcgacttcgactcgtgatagactgcaacacgtgtgtcacccagacagtcgacttcagccttgaccctaccttcaccattgagacaaccacacttcctcaggacgctgtctcccgcacccaacgtcggggcaggactggcagggggaagccaggcactacagatttgtggcaccgggagagcgcccttccggcatgttcgactcgtccgtcctctgtgagtgctatgacgcaggctgtgcttggtatgagctcacacccgccgagaccacagtcaggctacgacatacatgaacactccggggcttcccgtgtgccaagaccatcttgaattttgggagggcgtcttcacgggtctcacccatatagacgcccacttcctatctcagacaaagcagagtggggaaaactttccttacctggtaggtaccaagccaccgtgtgcgctagagctcaagctccccccccatcgtgggaccagatgtggaagtgcttgatccgcctcaaacccaccctccatgggccaacacctctgctatacaggctgggcgcgttcagaatgaagtcaccctgacgcacccaatcaccaagtacatcatgacatgcatgtcggct

SEQ ID NO: 562 - DNA, 4873 bp, Hepatitis C virus
caaccgtcgcccacaggacgttaagttcccgggtggcggtcagatcgttggtggagtttacttgttgccgcgcaggggccctagattgggtgtgcgcgcgacgaggaagacttccgagcggtcgcaactcgcggtagacgtcagcctatccccaaggcgcgtcggcccgagggcaggacctgggctcagcccgggtacccctggcccctctacggcaatgagggctgcgggtgggcgggatggctcctgtcccccgtggctctcggcctagctggggccccacagacccccggcgtaggtcgcgcaatttgggtaaggtcatcgacaccctcacgtgcggcttcgccgacctcatggggtacattccgctcgtcggcgcccctcttgggggcgctccagggccctggcgcatggcgtccgggtcctggaagacggcgtgaattatgcaacagggaaccttcctggttgctctttttctatcttccttctggccctgctctcttgcctgaccgtgcccgcgtcgcctatcaagtacgcaactcctcgggcctctaccatgtcaccaatgattgccctaactcgagtattgtgtacgagacggccgataccattctacattctccggggtgtgtcccttgcgttcgcgagggtaacgcctcgaaagttgggtggcggtggcccccacagtcgccaccagggatggcagactccccacaacgcagcttcgacgtcacatcgatctgcttgtcgggagcgccaccctctgctcggccctctatgtgggggactttgcgggtctgtcttccttgtcggtcaactgttcactttctcccccaggcgccactggacaacgcaagactgcaactgttctatctaccccggccatataacgggtcaccgcatggcatgggatatgatgatgaactggtccctacagcagcgctggtagtagctcagctgctcagggtcccgcaagccatcttggacatgatcgctggtgcccactggggagtcctagcgggcatagcgtatttctccatggtggggaactgggcgaagtcttagtggtgctgttgctgtttgccggcgttgatgcgggaacccacatcaccggggggagtgtcgctcattccacggcacgactcaccggtcttttcagtcgtggctcccagcagcatatccagctgatcaacaccaacgcagttggcacatcaatcgcacggccctgaactgtaatgaaagcctcaacactggctggctagcggggctcttctattccaacaaattcaactcttcaggctgccccgagaggttggccagctgtagccccttgccgatttcgaccagggctggggtcctatcagctacgccaacggaagcggccccgaccaccggccctactgctggcactaccccccaaagccttgtggtatcgtgccagcacagagcgtatgtggcccagtgtatgcttcacacccagccccgtggtggtgggaacgaccaacaagttgggcgcgcctacctacaactggggttgcaatgatacggacgtcttcgtccttaataacaccaggccgccgttgggcaattggttggttgcacctggatgaactcatctggatttaccaaagtgtgcggagcgcctccttgtgtcatcggaggggggggcaacaacaccttgcactgccccactgactgtttccgcaagcatccggaagccacatactctcggtgtgctccggtccctggatcacgcccaggtgcctggtccactatccttataggctttggcattatccttgtactgtcaactacaccatgttcaaagtcaggatgtacgtgggaggggtcgagcacaggctgacgttgcttgcaactggacgcggggcgagcgttgcgatctggacgacagggacaggtccgagctcagcccgctgctgctgtccaccacacagtggcaggtccttccgtgttcctttaccaccttgccagccttgactaccgcctcatccacctccaccagaacatcgtggatgtgcaatacttgtacggggtggggtcaagcattgtgtcctgggccatcaagtgggaatacgtcatcctcttatttctcctgcttgcagacgcgcgatctgctcctgcttgtggatgatgctactcatatcccaagcggaggcagcgttggagaaccttgtgttgctcaacgcggcgtctctggccgggacgcatggccttgcgtccttcctcgtgtttttctgctttgcatggtattgaagggtaagtgggcgcccggagcagcctacgccttctacgggatgtggcctctcctcctgctcctgttggcgttgccccagcgggcatacgcgctggacacggagatggccgcgtcgtgtggcgggttgttattgtcgggttaatggcgctgactctgtcaccgcactacaagcgctacatcagctggtgcttatggtggcttcagtatttcttgaccagagtagaagcgcaactgcacgtgtgggttccccccctcaacgtccgggggggcgtgacgctgtcatcctactcatgtgtgctgtacacccggctttggtatttgacatcaccaagctgctgttggccgtcttcggccctctttggattcttcaaaccagtctgctcaaagtgcctatttcgtgcgcgttcaaggccttctccggatctgcgcgctagcgcgcaagatggccggcggccattacgtgcaaatggccatcatcaagatgggggcgcttactggcacctatgtttataaccatctcactcctcttcggactgggcgcacaacggcctacgagatctggccgtggctgtagagccagtcgtcttctcccagatggagaccaagctcatcacgtggggggcggacaccgccgcgtgcggtgacatcatcaacggcttcccgtctctgcccgtaggggccgagagatactgctcggaccggccgatggaatggtctccaaggggtggaggttgctggcgcccatcacggcgtatgcccagcagacaaggggcctcttgggatgcataataaccagcctgccggccgggacaaaaaccaggtggagggtgaggttcagattgtgtcaactgctgcccagacctttctggcaacctgcatcaacggggtgtgctggactgtctaccacggggccggaacaaggaccatgcatcacccaaaggtcctgttatccagatgtacaccaatgtagaccaagacctcgtaggctggcccgctccccaaggtgcccgctcattgacaccctgcacttgcggctcctcggacctttacctggtcacgaggcacgccatgtcattcccgtacgccgacggggtgatagcaggggcagcctgctttcgccccggcctatctcttacttgaaaggctcctcggggggtccactactgtgccccgcgggacacgccgtaggcatattagggccgcggtgtgcacccgtggagtggctaaggcggtggactttatccccgtagagagcctagagacaaccatgaggtccccggtgttcacagacaattcctccccaccagcagtgccccagagcttccaggtggctcactgcatgctcccaccggcagcggtaagagcaccaaggtcccggccgcatacgcggctcaggggtacaaggtgttggtgctcaacccctccgttgctgcaacactgggttttggtgcctacatgtccaagcccatggggttgatcctaacatcaggactggggtgaggacaattactactggcagctccatcacgtactccacctacggcaagttcctcgccgacggcgggtgctcggggggtgcttatgacataataatttgtgacgaggccactccacggatgcaacatctatcttgggcatcggcaccgtccttgaccaagcagagactgcgggggcgagactggttgtgctcgccaccgctactcctccgggctccgtcaccgtgccccatccaacatcgaggaggttgctctgtctaccaccggagagatccccttttacggcaaggctatcccccttgaggcaatcaagggagggagacatctcattttctgccactcaaagaagaagtgcgacgagctcgccgcaaaactgtcgcgatgggcatcaatgccgtggcttactaccgcggccttgacgtgtccgtcatcccgaccagtggcgacgttgtcgttgtggcaactgatgctctcatgaccggctatatcggcgacttcgactcgtgatagactgcaacacgtgtgtcacccagacagtcgacttcagccttgaccctaccttcaccattgagacaaccacacttcctcaggacgctgtctcccgcacccaacgtcggggcaggactggcagggggaagccaggctctacagatttgtggcaccgggagagcgcccttccggcatgttcgactcgtccgtcctctgtgagtgctatgacgcaggctgtgcttggtatgagctcacacccgccgagaccacagtcaggctacggcatacatgaacactccggggcttcccgtgtgccaagaccatcttgaattttgggagggcgtcttcacgggtctcacccatatagacgcccacttcctatctcagacaaagcagagtggggaaaactttccttacctggtacgtaccaagccaccgtgtgcgctagagctcaagctccccccccatcgtgggaccagatgtggaagtgcttgatccgcctcaaacccaccctccatgggccaacacctctgctatacaggctgggcgcgttcagaatgaagtcaccctgacgcacccaatcaccaagtacatcatgacatgcatgtcggct

SEQ ID NO: 563 - DNA, 4873 bp, Hepatitis C virus
caaccgtcgcccacaggacgttaagttcccgggtggcggtcagatcgttggtggagtttacttgttgccgcgcaggggccctagattgggtgtgcgcgcgacgaggaagacttccgagcggtcgcaactcgaggtagacgtcagcctatccccaaggcgcgtcggcccgagggcaggacctgggctcagcccgggtacccttggcccctctatggcaatgagggctgcgggtgggcgggatggctcctgtcccccgtggctctcggcctagctggggccccacagacccccggcgtaggtcgcgcaatttgggtaaggtcatcgataccctcacgtgcggcttcgccgacctcatggggtacatcccgctcgtcggcgcccctcttgggggcgctccagggccctggcgcatggcgtccgggtcctggaagacggcgtgaattatgcaacagggaaccttcctggttgctctttctctatcttccttctggccctgctctcttgcctgaccgtgcccgcgtcgcctaccaagtacgcaactcctcgggcctctaccatgtcaccaatgattgccctaactcgagtattgtgtacgagacggccgataccattctacattctccggggtgtgtcccttgcgttcgcgagggtaacgcctcgaaggttgggtggcggtggcccccacagtcgccaccagggacggcaaactccccacaacgcagcttcgacgtcacatcgatctgcttgtcgggagcgccaccctctgctcggccctctatgtgggggactttgcgggtctgtcttccttgttggtcaactgttcactttctcccccaggcgccactggacaacgcaagactgcaactgttctatctaccccggccatataacgggtcaccgcatggcatgggatatgatgatgaactggtccccacagcagcgctggtagtagctcagctgctcagggtcccgcaagccatcttggacatgatcgctggtgcccactggggagtcctagcgggcatagcgtatttctccatggtggggaactgggcgaagtcttagtggtgctgttgctgtttgccggcgttgatgcgagaacccacaccaccggggggagcgttgctcacaccacgtcaacattcgccggccttttcgacaccggctcccagcagcatgtccagctgatcaacaccaacgcagttggcacatcaatcgcacggccttgaattgcaatgcgagccttaacactggctggctggcggggctcttctattctcgcaggttcaactcttcaggctgccccgagaggttggccagctgtagccccttgccgacttcgaccagggttggggtcctatcagctacgccaacggaagcggccccgaacaccggccctactgctggcactaccccccaaagccttgtggcatcgtaccagcacagagcgtatgtggcccagtgtatgcttcactcccagccccgtggtggtgggaacgaccgacaagttgggcgtgcctacctacagctggggtgaaaatgacacggacgtcttcgtccttaataacaccaggccaccgttgggcaattggttggttgcacctggatgaactcatctggatttaccaaagtgtgcggagcgcctccttgtgtcatcggaggggtgggcaacaacaccttgcactgccccactgactgtttccgcaagcatccggaagccacatactctcggtgtgctccggtccctggattacgcccaggtgcctggtccactattcttataggctttggcattatccttgtactgtcaactacaccatgttcaaagtcaggatgtacgtgggaggggtcgagcacaggctgatgttgcttgcaactggacacggggcgagcgttgcgatctggacgacagggacaggtccgagctcagcccgctgctgctgtccaccacacagtggcaggttcttccgtgttccttcaccaccttgccagccttgactaccgcctcatccacctccaccagaacgtcgtggatgtgcaatacttgtacggggtggggtcaagcattgtgtcctgggccatcaagtgggagtacgtcatcctcttgtttctcctgcttgcagacgcgcgatctgctcctgcttgtggatgatgttactcatatcccaagcggaggcagcgttggagaaccttgtgttgctcaacgcggcgtctctggccggggcgcacggccttgcgtccttcctcgtgtttttctgctttgcatggtattgaggggtaagtgggcgcccggagtagcctacgccttctacgggatgtggcctcttctcctgctcctgttggcgttgccccaacgggcatacgcgctggacacggagatggccgcgtcgtgtggcgggttgttattgtcgggttgatggcgctgactctgtcaccgcactacaagcgctatatcagctggtgcttatggtggcttcagtatttcctgaccagagtagaggcgcaactgcacgtgtgggttccccccctcaatgtccgggggggcgcgacgctgtcatcttactcatgtgtgttgtacacccggccttggtatttgacatcaccaagctgctgctggccgtcttcggccccctttggatccttcaaaccagtctgctcaaagtgcctatttcgtgcgcgtccaaggccttctccggatctgcgcgctagcgcgcaagatggccggcggccattacgtgcaaatggccatcatcaagatgggggcgcttactggcacctatgtctataaccatcttactcctcttcggactgggcgcacaacggcctacgagatctggccgtggctgtagagccagtcgtcttttcccagatggagaccaagctcattacgtggggggcggacaccgccgcgtgcggcgacatcatcaacggcttcccgtctctgcccgtagaggccgagagatactgctcggaccggccgatggagtggtctccaagggatggaggttgctggcgcccattacggcgtatgcccagcagacaaggggcctcttgggatgcataatcaccagcctgccggccgggacaaaaaccaggtggagggtgaggttcagattgtgtcaactgctgcccagacttttctggcaacctgcatcaacggggtgtgctggactgtctaccacggggccggaacaaggactatgcgtcacccaaaggtcctgttatccagatgtacaccaatgtagaccaagacctcgtaggctggcccgccccccaaggtgcccgctcactgacaccctgcacttgcggctcctcggacctctacctggtcacgaggcatgccatgtcattcccgtgcgccgacggggtgatagcaggggcagcctgctttcgccccggcccatctcttacttgaaaggctcctcggggggcccactactgtgccccgcgggacacgccgtaggcatattagggccgcggtgtgcacccgtggagtggctaaggcggtggactttatccccgtagagagcctagagacaaccatgaggtccccggtgttcacagacaactcctccccaccagcggtgccccagagcttccaggtggcccactgcatgctcccaccggcagcggtaagagcaccaaggtcccggccgcatacgcggctcagggctacaaggtgctggtgctcaacccctccgttgctgcgacactgggttttggcgcctacatgtccaaggccatgggattgatcctaacatcaggactggggtgaggacaattactactggcagccccatcacgtactccacctacggcaagttcctcgccgacggcgggtgctcagggggtgcttatgacataataatttgtgacgaggccactccacggatgcaacatccatcttgggcatcggcaccgtccttgaccaagcagagactgcgggggcgagactggtcgtgctcgccaccgctacccctccgggctccgtcactgtgccccacccaacatcgaggaggttgccctgtccaccaccggagagatccccttctacggcaaggctatcccccttgaggcaatcaagggagggagacatctcattttctgccactcaaagaagaaatgcgatgagctcgccacaaaactgttgcgatgggcatcaatgccgtggcttactaccgcggccttgacgtgtccgtcattccgaccagcggcgacgttgtcgttgtggcaactgatgctctcatgaccggctataccggcgacttcgactcgtgatagactgcaacacgtgtgtcacccagacagtcgacttcagccttgaccctaccttcaccattgagacaaccacacttcctcaggacgccgtctcccgcactcaacgtcggggcaggactggcagggggaaaccaggctctacagatttgtggcaccgggagagcgcccttccggcatgtttgactcgtctgtcctctgtgagtgctatgacgcaggctgtgcttggtatgagctcacgcccgccgagaccacagttaggctacggcatacatgaacactccggggcttcccgtgtgccaagatcatcttgaattttgggagggcgtctttacgggtctcacccatatagacgcccacttcctatctcagacaaagcagagtggggaaaaccttccttacctggtacataccaagccaccgtgtgcgctagagcccaagctccccccccatcgtgggaccagatgtggaagtgcttgatccgcctcaaacccacccttcatgggccaacacctctgctatacagactgggcgcgttcagaatgaagtcaccctgacgcacccaatcaccaagtacatcatgacatgcatgtcggct

SEQ ID NO: 564 - DNA, 4867 bp, Hepatitis C virus
accaaccgtcgcccacaggacgtcaagttcccgggtggcggtcagatcgttggtggagtttacttgttgccgcgcaggggccctagattgggtgtgcgcgcgacgaggaagacttccgagcggtcgcacctcgtggtagacgtcagcctatccccaaggcacgtcggcccgagggcaggacctgggctcagcccgggtacccctggcccctctatggcaatgagggctgcgggtgggcgggatggctcctgtctcccgcggctctcggcctagttggggccccacggacccccggcgtaggtcgcgcaatttgggtaaggtcatcgataccctcacatgcggcttcgccgacctcatggggtacataccgctcgtcggcgcccctcttggaggcgtgccagggccctggcgcatggcgtccgggttctggaagacggcgtgaactatgcaacagggaatcttcctggttgctctttctctatcttccttctggctctgctctcttgcctgactgtgcccgctcagcctaccaagtgcgcaactctacggggctttaccatgtcaccaatgattgccctaactcgagcattgtgtacgaggcggccgatgccatcctgcacactccggggtgtgtcccttgcgtccgcgagggtaactcctcgagtgttgggtggcggtgacccccacggtagccactaaggacggcaagctccccacaaggcagcttcgacgtcacatcgatctgcttgtcgggagcgccaccctctgctcggccctctacgtgggggactgtgcgggtccgtctttcttgtcggtcagctgttcaccttctctcccaggcgccactggacgacgcaagactgcaattgttctatctatcccggccatataacgggtcaccgcatggcgtgggatatgatgatgaactggtccctacggcggcattggtagtagctcagctgctccggatcccacaagccatcttggacatgatcgccggtgctcactggggagtcctggcgggcatggcgtatttctccatggtggggaactgggcgaggtcttggtagtgctgctgctatttgccggcgtcgacgcgcaaacccgcgtcaccgggggaagtgtcgcctacaccacggctggtattgctaggtttttccaaccaggcgccaagcagaacatccagctgatcaacaccacggcagttggcacatcaatagcacggccttgaactgcaatgcaagccttgaaaccggctggttagcaggacttttctatcacaacagattcaactcttcaggctgtcctgagaggttggccagctgcgaagccttgccgactttgaccagggctggggccccatcagccatgccaatggaagcggccccgaccaccgcccctactgctggcactaccccccaaaaccttgtggtattgtgcccgcaaagaacgtgtgtggcccggtatttgcttcacccccagccccgtggtggtgggaacgaccgacagggcgggtgcgcctacctacaactggggcgcaaatgaaacggacgtcttcgtccttaacaacaccaggccaccgcagggcaattggtcggttgtacctggatgaactcaaccgggttcaccaaagtgtgcggagcgcccccttgtgccatcggaggggtgggcaacaacaccttgcactgccccactgattgtttccgcaagcatccggaagccacgtactctcggtcggttctggtccctggatcacacccaggtgcatggtccactacccgtataggctctggcattatccctgtaccatcaactacactttatttaaagtcaggatgtacgtgggtggggtcgagcacaggtggaagctgcctgcaactggacgcggggcgaacgttgtgatctggaagacagggacaggtctgagcttagcccgttgctgctgtccaccacacagtggcaggtcctcccatgttcctttacgaccctgccagccttgtccacggcctcatccacctccaccagaacattgtggacgtgcagtatttgtacggggtggggtcaagcatcgcgtcctgggccattaaatgggagtacgtcgtcctcctgttccttctgctcgcagacgcagcgtctgctcttgcttgtggatgatgttactcatatcccaagcggaggcggctttggagaacctcgtggtactcaatgcagcatccctggccgggacgcacggtcttgtacccttcctcgtgttcttctgctttgcgtggtcctgaagggtaggtgggtgcccggagcggtctacgccctctacgggatgtggcctctcctcctgctcttgttggcgttgccccagcgagcatacgcactggacacggaggtggccgcgtcgtgtggcgcgttgttcttgtcgggttgatggcgctgactctgtcaccatattacaagcactatatcagctggtgcatgtggtggcttcagtactttctgaccagagcagaagcgcaactgcacgtgtgggttccccctctcaacgtccaggggggcgtgacgccgtcatcttactcacgtgtgttgtacacccgactttggtatttgacatcaccaaactactcctggccgttatcgggcccctttggatccttcaagccagtttgcttaaagtacctacttcgtgcgcgttcagggccttctccgaatctgcgcactagcgcggaaaatggccggaggccattacgtgcaaatggccatcatcaagttaggggcgcttactggcacctatgtctacaaccatctcactccccttcagactgggcgcacaacggcctgcgagatctggccgtggctgtggagccagtcgtcttctcccaaatggagaccaagctcatcacgtggggggcagacaccgccgcgtgcggtgacatcatcgacggctgcccgtctccgcccgtaggggccgggagatattgctcgggccggccgatggaatggtctccaaggggtggaggttgctggcgcctatcacagcgtacgcccagcagacaaggggcctcctagggtgtataatcaccagccgactggccgggacaaaaaccaagcggagggtgaggtccagattgtgtcaactgctgcccaaactttcctggcaacgtgcatcaatggggtatgctggactgtctaccacggggccggaacgaggaccttgcatcacccaagggtcctgttattcagatgtacaccaatgtggacaaagacctcgtgggctggcccgcccctcaaggtacccgctcattgacaccctgcacctgcggctcctcggacctttacttggtcacgaggcacgcgatgtcattcccgtgcgccggcgaggtgatagcagaggcagcctactttcgccccggcccatttcctacttgaaaggctcctcggggggtccactgttgtgccccgcggggcacgccgtgggcatatcagggccgcggtgtgcacccgtggagtggctaaagcggtggactttatccctgtggagaacctagagacaaccatgaggtccccggtgttctcggacaactcctctccaccagcagtgccccagagcttccaggtggctccctgcatgctcccaccggcagcggtaaaagcaccaaggtcccggccgcatacgctgctcagggctacaaggtgctagtgctcaacccctctgttgccgcaacactggcctttggcgcttacatgtccaggcccatggggtcgatcctaatgtcaggaccggggtgagaacaattaccactggcagcccaatcacgtactccacctacggcaagttccttgctgacggcgggtgctcggggggtgcctatgacataataatttgtgacggtgccactccacggatgccacgtccatcttgggcatcggcactgtccttgaccaagcagagaccgcgggggcgaggctggttgtgctcgccaccgctacccctccgggctccgtcaccgtgccccatctaacatcgaggaggttgctctgtccaccaccggagaggtccccttttacggcaaggctatccccctcgaggtaatcaagggggggagacatctcatcttctgtcactcaaaaaagaagtgcgacgagctcgccgcaaagcggtcgcgttgggcatcaatgccgtggcctactaccgtggccttgacgtgtctgtcatcccgaccagcggcgatgttgtcgtcgtggcgaccgatgctctcatgaccggctatactggcgacttcgaccggtgatagactgcaacacgtgtgtcacccaaacagtcgacttcagccttgaccctaccttcaccattgagacaaccacgctcccccaggatgctgtctcccgtactcaacgccggggcaggaccggcagggggaagtcagcatctacagattcgtggcaccaggggagcgcccttccggcatgttcgactcgtccgtcctctgtgagtgctatgacgcgggctgtgcttggtatgagctcacgcccgctgagaccactgttaggctagagcgtacatgaacaccccggggcttcctgtgtgccaggaccatcttgagttttgggagggcgtttttacaggcctcacccacatagatgcccactttctatcccagacaaagcagagtggggagaaccttccttacctggagcgtaccaggccaccgtgtgcgctagggctcaagcccctcccccatcgtgggaccagatgtggaagtgtttgatccgcctcaagcccaccctccatgggccaacacctctgctatacagactgggcctgttcagaatgaagtcaccttgacgcacccagtcaccaaatacatcatgacatgca

SEQ ID NO: 565 - DNA, 4867 bp, Hepatitis C virus
accaaccgtcgcccacaggacgtcaagttcccgggtggcggtcagatcgttggtggagtttacttgttgccgcgcaggggccctagattgggtgtgcgcgcgacgaggaagacttccgagcggtcgcacctcgtggtagacgtcagcctatccccaaggcacgtcggcccgagggcaggacctgggctcagcccgggtacccctggcccctctatggcaatgagggctgcgggtgggcgggatggctcctgtctcccgcggctctcggcctagttggggccccacggacccccggcgtaggtcgcgcaatttgggtaaggtcatcgataccctcacatgcggcttcgccgacctcatggggtacataccgctcgtcggcgcccctcttggaggcgtgccagggccctggcgcatggcgtccgggttctggaagacggcgtgaactatgcaacagggaatcttcctggttgctctttctctatcttccttctggctctgctctcttgcctgactgtgcccgctcagcctaccaagtgcgcaactctacggggctttaccatgtcaccaatgattgccctaactcgagcattgtgtacgaggcggccgatgccatcctgcacactccggggtgtgtcccttgcgtccgcgagggtaactcctcgagtgttgggtggcggtgacccccacggtagccactaaggacggcaagctccccacaaggcagcttcgacgtcacatcgatctgcttgtcgggagcgccaccctctgctcggccctctacgtgggggactgtgcgggtccgtctttcttgtcggtcagctgttcaccttctctcccaggcgccactggacgacgcaagactgcaattgttctatctatcccggccatataacgggtcaccgcatggcgtgggatatgatgatgaactggtccctacggcggcattggtagtagctcagctgctccggatcccacaagccatcttggacatgatcgccggtgctcactggggagtcctggcgggcatggcgtatttctccatggtggggaactgggcgaggtcttggtagtgctgctgctatttgccggcgtcgacgcgcaaacccgcgtcaccgggggaagtgtcgcctacaccacggctggtattgctaggtttttccaaccaggcgccaagcagaacatccagctgatcaacaccacggcagttggcacatcaatagcacggccttgaactgcaatgcaagccttgaaaccggctggttagcaggacttttctatcacaacagattcaactcttcaggctgtcctgagaggttggccagctgcgaagccttgccgactttgaccagggctggggccccatcagccatgccaatggaagcggccccgaccaccgcccctactgctggcactaccccccaaaaccttgtggtattgtgcccgcaaagaacgtgtgtggcccggtatttgcttcacccccagccccgtggtggtgggaacgaccgacagggcgggtgcgcctacctacaactggggcgcaaatgaaacggacgtcttcgtccttaacaacaccaggccaccgcagggcaattggtcggttgtacctggatgaactcaaccgggttcaccaaagtgtgcggagcgcccccttgtgccatcggaggggtgggcaacaacaccttgcactgccccactgattgtttccgcaagcatccggaagccacgtactctcggtcggttctggtccctggatcacacccaggtgcatggtccactacccgtataggctctggcattatccctgtaccatcaactacactttatttaaagtcaggatgtacgtgggtggggtcgagcacaggtggaagctgcctgcaactggacgcggggcgaacgttgtgatctggaagacagggacaggtctgagcttagcccgttgctgctgtccaccacacagtggcaggtcctcccatgttcctttacgaccctgccagccttgtccacggcctcatccacctccaccagaacattgtggacgtgcagtacttgtacggggtggggtcaagcatcgcgtcctgggccattaaatgggagtacgtcgtcctcctgttccttctgctcgcagacgcagcgtctgctcttgcttgtggatgatgttactcatatcccaagcggaggcggctttggagaacctcgtggtactcaatgcagcatccctggccgggacgcacggtcttgtacccttcctcgtgttcttctgctttgcgtggtcctgaagggtaggtgggtgcccggagcggtctacgccctctacgggatgtggcctctcctcctgctcttgttggcgttgccccagcgagcatacgcactggacacggaggtggccgcgtcgtgtggcgcgttgttcttgtcgggttgatggcgctgactctgtcaccatattacaagcactatatcagctggtgcatgtggtggcttcagtactttctgaccagagcagaagcgcaactgcacgtgtgggttccccctctcaacgtccaggggggcgtgacgccgtcatcttactcacgtgtgttgtacacccgactttggtatttgacatcaccaaactactcctggccgttatcgggcccctttggatccttcaagccagtttgcttaaagtacctacttcgtgcgcgttcagggccttctccgaatctgcgcactagcgcggaaaatggccggaggccattacgtgcaaatggccatcatcaagttaggggcgcttactggcacctatgtctacaaccatctcactccccttcagactgggcgcacaacggcctgcgagatctggccgtggctgtggagccagtcgtcttctcccaaatggagaccaagctcatcacgtggggggcagacaccgccgcgtgcggtgacatcatcgacggctgcccgtctccgcccgtaggggccgggagatattgctcgggccggccgatggaatggtctccaaggggtggaggttgctggcgcccatcacagcgtacgcccagcagacaaggggcctcctagggtgtataatcaccagccgactggccgggacaaaaaccaagcggagggtgaggtccagattgtgtcaactgctgcccaaactttcctggcaacgtgcatcaatggggtatgctggactgtctaccacggggccggaacgaggaccttgcatcacccaagggtcctgttattcagatgtacaccaatgtggacaaagacctcgtgggctggcccgcccctcaaggtacccgctcattgacaccctgcacctgcggctcctcggacctttacttggtcacgaggcacgcgatgtcattcccgtgcgccggcgaggtgatagcagaggcagcctactttcgccccggcccatttcctacttgaaaggctcctcggggggtccactgttgtgccccgcggggcacgccgtgggcatatcagggccgcggtgtgcacccgtggagtggctaaagcggtggactttatccctgtggagaacctagagacaaccatgaggtccccggtgttctcggacaactcctctccaccagcagtgccccagagcttccaggtggctccctgcatgctcccaccggcagcggtaaaagcaccaaggtcccggccgcatacgctgctcagggctacaaggtgctagtgctcaacccctctgttgccgcaacactggcctttggcgcttacatgtccaggcccatggggtcgatcctaatgtcaggaccggggtgagaacaattaccactggcagcccaatcacgtactccacctacggcaagttccttgctgacggcgggtgctcggggggtgcctatgacataataatttgtgacggtgccactccacggatgccacgtccatcttgggcatcggcactgtccttgaccaagcagagaccgcgggggcgaggctggttgtgctcgccaccgctacccctccgggctccgtcaccgtgccccatctaacatcgaggaggttgctctgtccaccaccggagaggtccccttttacggcaaggctatccccctcgaggtaatcaagggggggagacatctcatcttctgtcactcaaaaaagaagtgcgacgagctcgccgcaaagcggtcgcgttgggcatcaatgccgtggcctactaccgtggccttgacgtgtctgtcatcccgaccagcggcgatgttgtcgtcgtggcgaccgatgctctcatgaccggctatactggcgacttcgaccggtgatagactgcaacacgtgtgtcacccaaacagtcgacttcagccttgaccctaccttcaccattgagacaaccacgctcccccaggatgctgtctcccgtactcaacgccggggcaggaccggcagggggaagtcagcatctacagattcgtggcaccaggggagcgcccttccggcatgttcgactcgtccgtcctctgtgagtgctatgacgcgggctgtgcttggtatgagctcacgcccgctgagaccactgttaggctagagcgtacatgaacaccccggggcttcctgtgtgccaggaccatcttgagttttgggagggcgtttttacaggcctcacccacatagatgcccactttctatcccagacaaagcagagtggggagaaccttccttacctggagcgtaccaggccaccgtgtgcgctagggctcaagcccctcccccatcgtgggaccagatgtggaagtgtttgatccgcctcaagcccaccctccatgggccaacacctctgctatacagactgggcctgttcagaatgaagtcaccttgacgcacccagtcaccaaatacatcatgacatgca

SEQ ID NO: 566 - DNA, 4867 bp, Hepatitis C virus
accaaccgtcgcccacaggacgtcaagttcccgggtggcggtcagatcgttggtggagtttacttgttgccgcgcaggggccctagattgggtgtgcgcgcgacgaggaagacttccgagcggtcgcacctcgtggtagacgtcagcctatccccaaggcacgtcggcccgagggcaggacctgggctcagcccgggtacccctggcccctctatggcaatgagggctgcgggtgggcgggatggctcctgtctcccgcggctctcggcctagttggggccccacggacccccggcgtaggtcgcgcaatttgggtaaggtcatcgataccctcacatgcggcttcgccgacctcatggggtacataccgctcgtcggcgcccctcttggaggcgtgccagggccctggcgcatggcgtccgggttctggaagacggcgtgaactatgcaacagggaatcttcctggttgctctttctctatcttccttctggctctgctctcttgcctgactgtgcccgctcagcctaccaagtgcgcaactctacggggctttaccatgtcaccaatgattgccctaactcgagcattgtgtacgaggcggccgatgccatcctgcacactccggggtgtgtcccttgcgtccgcgagggtaactcctcgagtgttgggtggcggtgacccccacggtagccactaaggacggcaagctccccacaaggcagcttcgacgtcacatcgatctgcttgtcgggagcgccaccctctgctcggccctctacgtgggggactgtgcgggtccgtctttcttgtcggtcagctgttcaccttctctcccaggcgccactggacgacgcaagactgcaattgttctatctatcccggccatataacgggtcaccgcatggcgtgggatatgatgatgaactggtccctacggcggcattggtagtagctcagctgctccggatcccacaagccatcttggacatgatcgccggtgctcactggggagtcctggcgggcatggcgtatttctccatggtggggaactgggcgaggtcttggtagtgctgctgctatttgccggcgtcgacgcgcaaacccgcgtcaccgggggaagtgtcgcctacaccacggctggtattgctaggtttttccaaccaggcgccaagcagaacatccagctgatcaacaccacggcagttggcacatcaatagcacggccttgaactgcaatgcaagccttgaaaccggctggttagcaggacttttctatcacaacagattcaactcttcaggctgtcctgagaggttggccagctgcgaagccttgccgactttgaccagggctggggccccatcagccatgccaatggaagcggccccgaccaccgcccctactgctggcactaccccccaaaaccttgtggtattgtgcccgcaaagaacgtgtgtggcccggtatttgcttcacccccagccccgtggtggtgggaacgaccgacagggcgggtgcgcctacctacaactggggcgcaaatgaaacggacgtcttcgtccttaacaacaccaggccaccgcagggcaattggtcggttgtacctggatgaactcaaccgggttcaccaaagtgtgcggagcgcccccttgtgccatcggaggggtgggcaacaacaccttgcactgccccactgattgtttccgcaagcatccggaagccacgtactctcggtcggttctggtccctggatcacacccaggtgcatggtccactacccgtataggctctggcattatccctgtaccatcaactacactttatttaaagtcaggatgtacgtgggtggggtcgagcacaggtggaagctgcctgcaactggacgcggggcgaacgttgtgatctggaagacagggacaggtctgagcttagcccgttgctgctgtccaccacacagtggcaggtcctcccatgttcctttacgaccctgccagccttgtccacggcctcatccacctccaccagaacattgtggacgtgcagtatttgtacggggtggggtcaagcatcgcgtcctgggccattaaatgggagtacgtcgtcctcctgttccttctgctcgcagacgcagcgtctgctcttgcttgtggatgatgttactcatatcccaagcggaggcggctttggagaacctcgtggtactcaatgcagcatccctggccgggacgcacggtcttgtacccttcctcgtgttcttctgctttgcgtggtcctgaagggtaggtgggtgcccggagcggtctacgccctctacgggatgtggcctctcctcctgctcttgttggcgttgccccagcgagcatacgcactggacacggaggtggccgcgtcgtgtggcgcgttgttcttgtcgggttgatggcgctgactctgtcaccatattacaagcactatatcagctggtgcatgtggtggcttcagtactttctgaccagagcagaagcgcaactgcacgtgtgggttccccctctcaacgtccaggggggcgtgacgccgtcatcttactcacgtgtgttgtacacccgactttggtatttgacatcaccaaactactcctggccgttatcgggcccctttggatccttcaagccagtttgcttaaagtacctacttcgtgcgcgttcagggccttctccgaatctgcgcactagcgcggaaaatggccggaggccattacgtgcaaatggccatcatcaagttaggggcgcttactggcacctatgtctacaaccatctcactccccttcagactgggcgcacaacggcctgcgagatctggccgtggctgtggagccagtcgtcttctcccaaatggagaccaagctcatcacgtggggggcagacaccgccgcgtgcggtgacatcatcgacggctgcccgtctccgcccgtaggggccgggagatattgctcgggccggccgatggaatggtctccaaggggtggaggttgctggcgcccatcacagcgtacgcccagcagacaaggggcctcctagggtgtataatcaccagccgactggccgggacaaaaaccaagcggagggtgaggtccagattgtgtcaactgctgcccaaactttcctggcaacgtgcatcaatggggtatgctggactgtctaccacggggccggaacgaggaccttgcatcacccaagggtcctgttattcagatgtacaccaatgtggacaaagacctcgtgggctggcccgcccctcaaggtacccgctcattgacaccctgcacctgcggctcctcggacctttacttggtcacgaggcacgcgatgtcattcccgtgcgccggcgaggtgatagcagaggcagcctactttcgccccggcccatttcctacttgaaaggctcctcggggggtccactgttgtgccccgcggggcacgccgtgggcatatcagggccgcggtgtgcacccgtggagtggctaaagcggtggactttatccctgtggagaacctagagacaaccatgaggtccccggtgttctcggacaactcctctccaccagcagtgccccagagcttccaggtggctccctgcatgctcccaccggcagcggtaaaagcaccaaggtcccggccgcatacgctgctcagggctacaaggtgctagtgctcaacccctctgttgccgcaacactggcctttggcgcttacatgtccaggcccatggggtcgatcctaatgtcaggaccggggtgagaacaattaccactggcagcccaatcacgtactccacctacggcaagttccttgctgacggcgggtgctcggggggtgcctatgacataataatttgtgacggtgccactccacggatgccacgtccatcttgggcatcggcactgtccttgaccaagcagagaccgcgggggcgaggctggttgtgctcgccaccgctacccctccgggctccgtcaccgtgccccatctaacatcgaggaggttgctctgtccaccaccggagaggtccccttttacggcaaggctatccccctcgaggtaatcaagggggggagacatctcatcttctgtcactcaaaaaagaagtgcgacgagctcgccgcaaagcggtcgcgttgggcatcaatgccgtggcctactaccgtggccttgacgtgtctgtcatcccgaccagcggcgatgttgtcgtcgtggcgaccgatgctctcatgaccggctatactggcgacttcgaccggtgatagactgcaacacgtgtgtcacccaaacagtcgacttcagccttgaccctaccttcaccattgagacaaccacgctcccccaggatgctgtctcccgtactcaacgccggggcaggaccggcagggggaagtcagcatctacagattcgtggcaccaggggagcgcccttccggcatgttcgactcgtccgtcctctgtgagtgctatgacgcgggctgtgcttggtatgagctcacgcccgctgagaccactgttaggctagagcgtacatgaacaccccggggcttcctgtgtgccaggaccatcttgagttttgggagggcgtttttacaggcctcacccacatagatgcccactttctatcccagacaaagcagagtggggagaaccttccttacctggagcgtaccaggccaccgtgtgcgctagggctcaagcccctcccccatcgtgggaccagatgtggaagtgtttgatccgcctcaagcccaccctccatgggccaacacctctgctatacagactgggcctgttcagaatgaagtcaccttgacgcacccagtcaccaaatacatcatgacatgca

SEQ ID NO: 567 - DNA, 4867 bp, Hepatitis C virus
accaaccgtcgcccacaggacgtcaagttcccgggtggcggtcagatcgttggtggagtttacttgttgccgcgcaggggccctagattgggtgtgcgcgcgacgaggaagacttccgagcggtcgcacctcgtggtagacgtcagcctatccccaaggcacgtcggcccgagggcaggacctgggctcagcccgggtacccctggcccctctatggcaatgagggctgcgggtgggcgggatggctcctgtctcccgcggctctcggcctagttggggccccacggacccccggcgtaggtcgcgcaatttgggtaaggtcatcgataccctcacatgcggcttcgccgacctcatggggtacataccgctcgtcggcgcccctcttggaggcgtgccagggccctggcgcatggcgtccgggttctggaagacggcgtgaactatgcaacagggaatcttcctggttgctctttctctatcttccttctggctctgctctcttgcctgactgtgcccgctcagcctaccaagtgcgcaactctacggggctttaccatgtcaccaatgattgccctaactcgagcattgtgtacgaggcggccgatgccatcctgcacactccggggtgtgtcccttgcgtccgcgagggtaactcctcgagtgttgggtggcggtgacccccacggtagccactaaggacggcaagctccccacaaggcagcttcgacgtcacatcgatctgcttgtcgggagcgccaccctctgctcggccctctacgtgggggactgtgcgggtccgtctttcttgtcggtcagctgttcaccttctctcccaggcgccactggacgacgcaagactgcaattgttctatctatcccggccatataacgggtcaccgcatggcgtgggatatgatgatgaactggtccctacggcggcattggtagtagctcagctgctccggatcccacaagccatcttggacatgatcgccggtgctcactggggagtcctggcgggcatggcgtatttctccatggtggggaactgggcgaggtcttggtagtgctgctgctatttgccggcgtcgacgcgcaaacccgcgtcaccgggggaagtgtcgcctacaccacggctggtattgctaggtttttccaaccaggcgccaagcagaacatccagctgatcaacaccacggcagttggcacatcaatagcacggccttgaactgcaatgcaagccttgaaaccggctggttagcaggacttttctatcacaacagattcaactcttcaggctgtcctgagaggttggccagctgcgaagccttgccgactttgaccagggctggggccccatcagccatgccaatggaagcggccccgaccaccgcccctactgctggcactaccccccaaaaccttgtggtattgtgcccgcaaagaacgtgtgtggcccggtatttgcttcacccccagccccgtggtggtgggaacgaccgacagggcgggtgcgcctacctacaactggggcgcaaatgaaacggacgtcttcgtccttaacaacaccaggccaccgcagggcaattggtcggttgtacctggatgaactcaaccgggttcaccaaagtgtgcggagcgcccccttgtgccatcggaggggtgggcaacaacaccttgcactgccccactgattgtttccgcaagcatccggaagccacgtactctcggtcggttctggtccctggatcacacccaggtgcatggtccactacccgtataggctctggcattatccctgtaccatcaactacactttatttaaagtcaggatgtacgtgggtggggtcgagcacaggtggaagctgcctgcaactggacgcggggcgaacgttgtgatctggaagacagggacaggtctgagcttagcccgttgctgctgtccgccacacagtggcaggtcctcccatgttcctttacgaccctgccagccttgtccacggcctcatccacctccaccagaacattgtggacgtgcagtatttgtacggggtggggtcaagcatcgcgtcctgggccattaaatgggagtacgtcgtcctcctgttccttctgctcgcagacgcagcgtctgctcttgcttgtggatgatgttactcatatcccaagcggaggcggctttggagaacctcgtggtactcaatgcagcatccctggccgggacgcacggtcttgtacccttcctcgtgttcttctgctttgcgtggtcctgaagggtaggtgggtgcccggagcggtctacgccctctacgggatgtggcctctcctcctgctcttgttggcgttgccccagcgagcatacgcactggacacggaggtggccgcgtcgtgtggcgcgttgttcttgtcgggttgatggcgctgactctgtcaccatattacaagcactatatcagctggtgcatgtggtggcttcagtactttctgaccagagcagaagcgcaactgcacgtgtgggttccccctctcaacgtccaggggggcgtgacgccgtcatcttactcacgtgtgttgtacacccgactttggtatttgacatcaccaaactactcctggccgttatcgggcccctttggatccttcaagccagtttgcttaaagtacctacttcgtgcgcgttcagggccttctccgaatctgcgcactagcgcggaaaatggccggaggccattacgtgcaaatggccatcatcaagttaggggcgcttactggcacctatgtctacaaccatctcactccccttcagactgggcgcacaacggcctgcgagatctggccgtggctgtggagccagtcgtcttctcccaaatggagaccaagctcatcacgtggggggcagacaccgccgcgtgcggtgacatcatcgacggctgcccgtctccgcccgtaggggccgggagatattgctcgggccggccgatggaatggtctccaaggggtggaggttgctggcgcccatcacagcgtacgcccagcagacaaggggcctcctagggtgtataatcaccagccgactggccgggacaaaaaccaagcggagggtgaggtccagattgtgtcaactgctgcccaaactttcctggcaacgtgcatcaatggggtatgctggactgtctaccacggggccggaacgaggaccttgcatcacccaagggtcctgttattcagatgtacaccaatgtggacaaagacctcgtgggctggcccgcccctcaaggtacccgctcattgacaccctgcacctgcggctcctcggacctttacttggtcacgaggcacgcgatgtcattcccgtgcgccggcgaggtgatagcagaggcagcctactttcgccccggcccatttcctacttgaaaggctcctcggggggtccactgttgtgccccgcggggcacgccgtgggcatatcagggccgcggtgtgcacccgtggagtggctaaagcggtggactttatccctgtggagaacctagagacaaccatgaggtccccggtgttctcggacaactcctctccaccagcagtgccccagagcttccaggtggctccctgcatgctcccaccggcagcggtaaaagcaccaaggtcccggccgcatacgctgctcagggctacaaggtgctagtgctcaacccctctgttgccgcaacactggcctttggcgcttacatgtccaggcccatggggtcgatcctaatgtcaggaccggggtgagaacaattaccactggcagcccaatcacgtactccacctacggcaagttccttgctgacggcgggtgctcggggggtgcctatgacataataatttgtgacggtgccactccacggatgccacgtccatcttgggcatcggcactgtccttgaccaagcagagaccgcgggggcgaggctggttgtgctcgccaccgctacccctccgggctccgtcaccgtgccccatctaacatcgaggaggttgctctgtccaccaccggagaggtccccttttacggcaaggctatccccctcgaggtaatcaagggggggagacatctcatcttctgtcactcaaaaaagaagtgcgacgagctcgccgcaaagcggtcgcgttgggcatcaatgccgtggcctactaccgtggccttgacgtgtctgtcatcccgaccagcggcgatgttgtcgtcgtggcgaccgatgctctcatgaccggctatactggcgacttcgaccggtgatagactgcaacacgtgtgtcacccaaacagtcgacttcagccttgaccctaccttcaccattgagacaaccacgctcccccaggatgctgtctcccgtactcaacgccggggcaggaccggcagggggaagtcagcatctacagattcgtggcaccaggggagcgcccttccggcatgttcgactcgtccgtcctctgtgagtgctatgacgcgggctgtgcttggtatgagctcacgcccgctgagaccactgttaggctagagcgtacatgaacaccccggggcttcctgtgtgccaggaccatcttgagttttgggagggcgtttttacaggcctcacccacatagatgcccactttctatcccagacaaagcagagtggggagaaccttccttacctggagcgtaccaggccaccgtgtgcgctagggctcaagcccctcccccatcgtgggaccagatgtggaagtgtttgatccgcctcaagcccaccctccatgggccaacacctctgctatacagaatgggcctgttcagaatgaagtcaccttgacgcacccagtcaccaaatacatcatgacatgca

SEQ ID NO: 568 - DNA, 4867 bp, Hepatitis C virus
accaaccgtcgcccacaggacgtcaagttcccgggtggcggtcagatcgttggtggagtttacttgttgccgcgcaggggccctagattgggtgtgcgcgcgacgaggaagacttccgagcggtcgcacctcgtggtagacgtcagcctatccccaaggcacgtcggcccgagggcaggacctgggctcagcccgggtacccctggcccctctatggcaatgagggctgcgggtgggcgggatggctcctgtctcccgcggctctcggcctagttggggccccacggacccccggcgtaggtcgcgcaatttgggtaaggtcatcgataccctcacatgcggcttcgccgacctcatggggtacataccgctcgtcggcgcccctcttggaggcgtgccagggccctggcgcatggcgtccgggttctggaagacggcgtgaactatgcaacagggaatcttcctggttgctctttctctatcttccttctggctctgctctcttgcctgactgtgcccgctcagcctaccaagtgcgcaactctacggggctttaccatgtcaccaatgattgccctaactcgagcattgtgtacgaggcggccgatgccatcctgcacactccggggtgtgtcccttgcgtccgcgagggtaactcctcgagtgttgggtggcggtgacccccacggtagccactaaggacggcaagctccccacaaggcagcttcgacgtcacatcgatctgcttgtcgggagcgccaccctctgctcggccctctacgtgggggactgtgcgggtccgtctttcttgtcggtcagctgttcaccctctctcccaggcgccactggacgacgcaagactgcaattgttctatctatcccggccatataacgggtcaccgcatggcgtgggatatgatgatgaactggtccctacggcggcattggtagtagctcagctgctccggatcccacaagccatcttggacatgatcgccggtgctcactggggagtcctggcgggcatggcgtatttctccatggtggggaactgggcgaggtcttggtagtgctgctgctatttgccggcgtcgacgcgcaaacccgcgtcaccgggggaagtgtcgcctacaccacggctggtattgctaggtttttccaaccaggcgccaagcagaacatccagctgatcaacaccacggcagttggcacatcaatagcacggccttgaactgcaatgcaagccttgaaaccggctggttagcaggacttttctatcacaacagattcaactcttcaggctgtcctgagaggttggccagctgcgaagccttgccgactttgaccagggctggggccccatcagccatgccaatggaagcggccccgaccaccgcccctactgctggcactaccccccaaaaccttgtggtattgtgcccgcaaagaacgtgtgtggcccggtatttgcttcacccccagccccgtggtggtgggaacgaccgacagggcgggtgcgcctacctacaactggggcgcaaatgaaacggacgtcttcgtccttaacaacaccaggccaccgcagggcaattggtcggttgtacctggatgaactcaaccgggttcaccaaagtgtgcggagcgcccccttgtgccatcggaggggtgggcaacaacaccttgcactgccccactgattgtttccgcaagcatccggaagccacgtactctcggtcggttctggtccctggatcacacccaggtgcatggtccactacccgtataggctctggcattatccctgtaccatcaactacactttatttaaagtcaggatgtacgtgggtggggtcgagcacaggtggaagctgcctgcaactggacgcggggcgaacgttgtgatctggaagacagggacaggtctgagcttagcccgttgctgctgtccaccacacagtggcaggtcctcccatgttcctttacgaccctgccagccttgtccacggcctcatccacctccaccagaacattgtggacgtgcagtatttgtacggggtggggtcaagcatcgcgtcctgggccattaaatgggagtacgtcgtcctcctgttccttctgctcgcagacgcagcgtctgctcttgcttgtggatgatgttactcatatcccaagcggaggcggctttggagaacctcgtggtactcaatgcagcatccctggccgggacgcacggtcttgtacccttccccgtgttcttctgctttgcgtggtcctgaagggtaggtgggtgcccggagcggtctacgccctctacgggatgtggcctctcctcctgctcttgttggcgttgccccagcgagcatacgcactggacacggaggtggccgcgtcgtgtggcgcgttgttcttgtcgggttgatggcgctgactctgtcaccatattacaagcactatatcagctggtgcatgtggtggcttcagtactttctgaccagagcagaagcgcaactgcacgtgtgggttccccctctcaacgtccaggggggcgtgacgccgtcatcttactcacgtgtgttgtacacccgactttggtatttgacatcaccaaactactcctggccgttatcgggcccctttggatccttcaagccagtttgcttaaagtacctacttcgtgcgcgttcagggccttctccgaatctgcgcactagcgcggaaaatggccggaggccattacgtgcaaatggccatcatcaagttaggggcgcttactggcacctatgtctacaaccatctcactccccttcagactgggcgcacaacggcctgcgagatctggccgtggctgtggagccagtcgtcttctcccaaatggagaccaagctcatcacgtggggggcagacaccgccgcgtgcggtgacatcatcgacggctgcccgtctccgcccgtaggggccgggagatattgctcgggccggccgatggaatggtctccaaggggtggaggttgctggcgcccatcacagcgtacgcccagcagacaaggggcctcctagggtgtataatcaccagccgactggccgggacaaaaaccaagcggagggtgaggtccagattgtgtcaactgctgcccaaactttcctggcaacgtgcatcaatggggtatgctggactgtctaccacggggccggaacgaggaccttgcatcacccaagggtcctgttattcagatgtacaccaatgtggacaaagacctcgtgggctggcccgcccctcaaggtacccgctcattgacaccctgcacctgcggctcctcggacctttacttggtcacgaggcacgcgatgtcattcccgtgcgccggcgaggtgatagcagaggcagcctactttcgccccggcccatttcctacttgaaaggctcctcggggggtccactgttgtgccccgcggggcacgccgtgggcatatcagggccgcggtgtgcacccgtggagtggctaaagcggtggactttatccctgtggagaacctagagacaaccatgaggtccccggtgttctcggacaactcctctccaccagcagtgccccagagcttccaggtggctccctgcatgctcccaccggcagcggtaaaagcaccaaggtcccggccgcatacgctgctcagggctacaaggtgctagtgctcaacccctctgttgccgcaacactggcctttggcgcttacatgtccaggcccatggggtcgatcctaatgtcaggaccggggtgagaacaattaccactggcagcccaatcacgtactccacctacggcaagttccttgctgacggcgggtgctcggggggtgcctatgacataataatttgtgacggtgccactccacggatgccacgtccatcttgggcatcggcactgtccttgaccaagcagagaccgcgggggcgaggctggttgtgctcgccaccgctacccctccgggctccgtcaccgtgccccatctaacatcgaggaggttgctctgtccaccaccggagaggtccccttttacggcaaggctatccccctcgaggtaatcaagggggggagacatctcatcttctgtcactcaaaaaagaagtgcgacgagctcgccgcaaagcggtcgcgttgggcatcaatgccgtggcctactaccgtggccttgacgtgtctgtcatcccgaccagcggcgatgttgtcgtcgtggcgaccgatgctctcatgaccggctatactggcgacttcgaccggtgatagactgcaacacgtgtgtcacccaaacagtcgacttcagccttgaccctaccttcaccattgagacaaccacgctcccccaggatgctgtctcccgtactcaacgccggggcaggaccggcagggggaagtcagcatctacagattcgtggcaccaggggagcgcccttccggcatgttcgactcgtccgtcctctgtgagtgctatgacgcgggctgtgcttggtatgagctcacgcccgctgagaccactgttaggctagagcgtacatgaacaccccggggcttcctgtgtgccaggaccatcttgagttttgggagggcgtttttacaggcctcacccacatagatgcccactttctatcccagacaaagcagagtggggagaaccttccttacctggagcgtaccaggccaccgtgtgcgctagggctcaagcccctcccccatcgtgggaccagatgtggaagtgtttgatccgcctcaagcccaccctccatgggccaacacctctgctatacagactgggcctgttcagaatgaagtcaccttgacgcacccagtcaccaaatacatcatgacatgca

SEQ ID NO: 569 - DNA, 4867 bp, Hepatitis C virus; identical to SEQ ID NO: 566

SEQ ID NO: 570 - DNA, 4867 bp, Hepatitis C virus
accaaccgtcgcccacaggacgtcaagttcccgggtggcggtcagatcgttggtggagtttacttgttgccgcgcaggggccctagattgggtgtgcgcgcgacgaggaagacttccgagcggtcgcacctcgtggtagacgtcagcctatccccaaggcacgtcggcccgagggcaggacctgggctcagcccgggtacccctggcccctctatggcaatgagggctgcgggtgggcgggatggctcctgtctcccgcggctctcggcctagttggggccccacggacccccggcgtaggtcgcgcaatttgggtaaggtcatcgataccctcacatgcggcttcgccgacctcatggggtacataccgctcgtcggcgcccctcttggaggcgtgccagggccctggcgcatggcgtccgggttctggaagacggcgtgaactatgcaacagggaatcttcctggttgctctttctctatcttccttctggctctgctctcttgcctgactgtgcccgctcagcctaccaagtgcgcaactctacggggctttaccatgtcaccaatgattgccctaactcgagcattgtgtacgaggcggccgatgccatcctgcacactccggggtgtgtcccttgcgtccgcgagggtaactcctcgagtgttgggtggcggtgacccccacggtagccactaaggacggcaagctccccacaaggcagcttcgacgtcacatcgatctgcttgtcgggagcgccaccctctgctcggccctctacgtgggggactgtgcgggtccgtctttcttgtcggtcagctgttcaccttctctcccaggcgccactggacgacgcaagactgcaattgttctatctatcccggccatataacgggtcaccgcatggcgtgggatatgatgatgaactggtccctacggcggcattggtagtagctcagctgctccggatcccacaagccatcttggacatgatcgccggtgctcactggggagtcctggcgggcatggcgtatttctccatggtggggaactgggcgaggtcttggtagtgctgctgctatttgccggcgtcgacgcgcaaacccgcgtcaccgggggaagtgtcgcctacaccacggctggtattgctaggtttttccaaccaggcgccaagcagaacatccagctgatcaacaccacggcagttggcacatcaatagcacggccttgaactgcaatgcaagccttgaaaccggctggttagcaggacttttctatcacaacagattcaactcttcaggctgtcctgagaggttggccagctgcgaagccttgccgactttgaccagggctggggccccatcagccatgccaatggaagcggccccgaccaccgcccctactgctggcactaccccccaaaaccttgtggtattgtgcccgcaaagaacgtgtgtggcccggtatttgcttcacccccagccccgtggtggtgggaacgaccgacagggcgggtgcgcctacctacaactggggcgcaaatgaaacggacgtcttcgtccttaacaacaccaggccaccgcagggcaattggtcggttgtacctggatgaactcaaccgggttcaccaaagtgtgcggagcgcccccttgtgccatcggaggggtgggcaacaacaccttgcactgccccactgattgtttccgcaagcatccggaagccacgtactctcggtcggttctggtccctggatcacacccaggtgcatggtccactacccgtataggctctggcattatccctgtaccatcaactacactttatttaaagtcaggatgtacgtgggtggggtcgagcacaggtggaagctgcctgcaactggacgcggggcgaacgttgtgatctggaagacagggacaggtctgagcttagcccgttgctgctgtccaccacacagtggcaggtcctcccatgttcctttacgaccctgccagccttgtccacggcctcatccacctccaccagaacattgtggacgtgcagtatttgtacggggtggggtcaagcatcgcgtcctgggccattaaatgggagtacgtcgtcctcctgttccttctgctcgcagacgcagcgtctgctcttgcttgtggatgatgttactcatatcccaagcggaggcggctttggagaacctcgtggtactcaatgcagcatccctggccgggacgcacggtctcgtacccttcctcgtgttcttctgctttgcgtggtcctgaagggtaggtgggtgcccggagcggtctacgccctctacgggatgtggcctctcctcctgctcttgttggcgttgccccagcgagcatacgcactggacacggaggtggccgcgtcgtgtggcgcgttgttcttgtcgggttgatggcgctgactctgtcaccatattacaagcactatatcagctggtgcatgtggtggcttcagtactttctgaccagagcagaagcgcaactgcacgtgtgggttccccctctcaacgtccaggggggcgtgacgccgtcatcttactcacgtgtgttgtacacccgactttggtatttgacatcaccaaactactcctggccgttatcgggcccctttggatccttcaagccagtttgcttaaagtacctacttcgtgcgcgttcagggccttctccgaatctgcgcactagcgcggaaaatggccggaggccattacgtgcaaatggccatcatcaagttaggggcgcttactggcacctatgtctacaaccatctcactccccttcagactgggcgcacaacggcctgcgagatctggccgtggctgtggagccagtcgtcttttcccaaatggagaccaagctcatcacgtggggggcagacaccgccgcgtgcggtgacatcatcgacggctgcccgtctccgcccgtaggggccgggagatattgctcgggccggccgatggaatggtctccaaggggtggaggttgctggcgcccatcacagcgtacgcccagcagacaaggggcctcctagggtgtataatcaccagccgactggccgggacaaaaaccaagcggagggtgaggtccagattgtgtcaactgctgcccaaactttcctggcaacgtgcatcaatggggtatgctggactgtctaccacggggccggaacgaggaccttgcatcacccaagggtcctgttattcagatgtacaccaatgtggacaaagacctcgtgggctggcccgcccctcaaggtacccgctcattgacaccctgcacctgcggctcctcggacctttacttggtcacgaggcacgcgatgtcattcccgtgcgccggcgaggtgatagcagaggcagcctactttcgccccggcccatttcctacttgaaaggctcctcggggggtccactgttgtgccccgcggggcacgccgtgggcatatcagggccgcggtgtgcacccgtggagtggctaaagcggtggactttatccctgtggagaacctagagacaaccatgaggtccccggtgttctcggacaactcctctccaccagcagtgccccagagcttccaggtggctccctgcatgctcccaccggcagcggtaagagcaccaaggtcccggccgcatacgctgctcagggctacaaggtgctagtgctcaacccctctgttgccgcaacactggcctttggcgcttacatgtccaggcccatggggtcgatcctaatgtcaggaccggggtgagaacaattaccactggcagcccaatcacgtactccacctacggcaagttccttgctgacggcgggtgctcggggggtgcctatgacataataatttgtgacggtgccactccacggatgccacgtccatcttgggcatcggcactgtccttgaccaagcagagaccgcgggggcgaggctggttgtgctcgccaccgctacccctccgggctccgtcaccgtgccccatctaacatcgaggaggttgctctgtccaccaccggagaggtccccttttacggcaaggctatccccctcgaggtaatcaagggggggagacatctcatcttctgtcactcaaaaaagaagtgcgacgagctcgccgcaaagcggtcgcgttgggcatcaatgccgtggcctactaccgtggccttgacgtgtctgtcatcccgaccagcggcgatgttgtcgtcgtggcgaccgatgctctcatgaccggctatactggcgacttcgaccggtgatagactgcaacacgtgtgtcacccaaacagtcgacttcagccttgaccctaccttcaccattgagacaaccacgctcccccaggatgctgtctcccgtactcaacgccggggcaggaccggcagggggaagtcagcatctacagattcgtggcaccaggggagcgcccttccggcatgttcgactcgtccgtcctctgtgagtgctatgacgcgggctgtgcttggtatgagctcacgcccgctgagaccactgttaggctagagcgtacatgaacaccccggggcttcctgtgtgccaggaccatcttgagttttgggagggcgtttttacaggcctcacccacatagatgcccactttctatcccagacaaagcagagtggggagaaccttccttacctggagcgtaccaggccaccgtgtgcgctagggctcaagcccctcccccatcgtgggaccagatgtggaagtgtttgatccgcctcaagcccaccctccatgggccaacacctctgctatacagactgggcctgttcagaatgaagtcaccttgacgcacccagtcaccaaatacatcatgacatgca

SEQ ID NO: 571 - DNA, 4867 bp, Hepatitis C virus
accaaccgtcgcccacaggacgtcaagttcccgggtggcggtcagatcgttggtggagtttacttgttgccgcgcaggggccctagattgggtgtgcgcgcgacgaggaagacttccgagcggtcgcacctcgtggtagacgtcagcctatccccaaggcacgtcggcccgagggcaggacctgggctcagcccgggtacccctggcccctctatggcaatgagggctgcgggtgggcgggatggctcctgtctcccgcggctctcggcctagttggggccccacggacccccggcgtaggtcgcgcaatttgggtaaggtcatcgataccctcacatgcggcttcgccgacctcatggggtacataccgctcgtcggcgcccctcttggaggcgtgccagggccctggcgcatggcgtccgggttctggaagacggcgtgaactatgcaacagggaatcttcctggttgctctttctctatcttccttctggctctgctctcttgcctgactgtgcccgctcagcctaccaagtgcgcaactctacggggctttaccatgtcaccaatgattgccctaactcgagcattgtgtacgaggcggccgatgccatcctgcacactccggggtgtgtcccttgcgtccgcgagggtaactcctcgagtgttgggtggcggtgacccccacggtagccactaaggacggcaagctccccacaaggcagcttcgacgtcacatcgatctgcttgtcgggagcgccaccctctgctcggccctctacgtgggggactgtgcgggtccgtctttcttgtcggtcagctgttcaccttctctcccaggcgccactggacgacgcaagactgcaattgttctatctatcccggccatataacgggtcaccgcatggcgtgggatatgatgatgaactggtccctacggcggcattggtagtagctcagctgctccggatcccacaagccatcttggacatgatcgccggtactcactggggagtcctggcgggcatggcgtatttctccatggtggggaactgggcgaggtcttggtagtgctgctgctatttgccggcgtcgacgcgcaaacccgcgtcaccgggggaagtgtcgcctacaccacggctggtattgctaggtttttccaaccaggcgccaagcagaacatccagctgatcaacaccacggcagttggcacatcaatagcacggccttgaactgcaatgcaagccttgaaaccggctggttagcaggacttttctatcacaacagattcaactcttcaggctgtcctgagaggttggccagctgcgaagccttgccgactttgaccagggctggggccccatcagccatgccaatggaagcggccccgaccaccgcccctactgctggcactaccccccaaaaccttgtggtattgtgcccgcaaagaacgtgtgtggcccggtatttgcttcacccccagccccgtggtggtgggaacgaccgacagggcgggtgcgcctacctacaactggggcgcaaatgaaacggacgtcttcgtccttaacaacaccaggccaccgcagggcaattggtcggttgtacctggatgaactcaaccgggttcaccaaagtgtgcggagcgcccccttgtgccatcggaggggtgggcaacaacaccttgcactgccccactgattgtttccgcaagcatccggaagccacgtactctcggtcggttctggtccctggatcacacccaggtgcatggtccactacccgtataggctctggcattatccctgtaccatcaactacactttatttaaagtcaggatgtacgtgggtggggtcgagcacaggtggaagctgcctgcaactggacgcggggcgaacgttgtgatctggaagacagggacaggtctgagcttagcccgttgctgctgtccaccacacagtggcaggtcctcccatgttcctttacgaccctgccagccttgtccacggcctcatccacctccaccagaacattgtggacgtgcagtatttgtacggggtggggtcaagcatcgcgtcctgggccattaaatgggagtacgtcgtcctcctgttccttctgctcgcagacgcagcgtctgctcttgcttgtggatgatgttactcatatcccaagcggaggcggctttggagaacctcgtggtactcaatgcagcatccctggccgggacgcacggtcttgtacccttcctcgtgttcttctgctttgcgtggtcctgaagggtaggtgggtgcccggagcggtctacgccctctacgggatgtggcctctcctcctgctcttgttggcgttgccccagcgagcatacgcactggacacggaggtggccgcgtcgtgtggcgcgttgttcttgtcgggttgatggcgctgactctgtcaccatattacaagcactatatcagctggtgcatgtggtggcttcagtactttctgaccagagcagaagcgcaactgcacgtgtgggttccccctctcaacgtccaggggggcgtgacgccgtcatcttactcacgtgtgttgtacacccgactttggtatttgacatcaccaaactactcctggccgttatcgggcccctttggatccttcaagccagtttgcttaaagtacctacttcgtgcgcgttcagggccttctccgaatctgcgcactagcgcggaaaatggccggaggccattacgtgcaaatggccatcatcaagttaggggcgcttactggcacctatgtctacaaccatctcactccccttcagactgggcgcacaacggcctgcgagatctggccgtggctgtggagccagtcgtcttctcccaaatggagaccaagctcatcacgtggggggcagacaccgccgcgtgcggtgacatcatcgacggctgcccgtctccgcccgtaggggccgggagatattgctcgggccggccgatggaatggtctccaaggggtggaggttgctggcgcccatcacagcgtacgcccagcagacaaggggcctcctagggtgtataatcaccagccgactggccgggacaaaaaccaagcggagggtgaggtccagattgtgtcaactgctgcccaaactttcctggcaacgtgcatcaatggggtatgctggactgtctaccacggggccggaacgaggaccttgcatcacccaagggtcctgttattcagatgtacaccaatgtggacaaagacctcgtgggctggcccgcccctcaaggtacccgctcattgacaccctgcacctgcggctcctcggacctttacttggtcacgaggcacgcgatgtcattcccgtgcgccggcgaggtgatagcagaggcagcctactttcgccccggcccatttcctacttgaaaggctcctcggggggtccactgttgtgccccgcggggcacgccgtgggcatatcagggccgcggtgtgcacccgtggagtggctaaagcggtggactttatccctgtggagaacctagagacaaccatgaggtccccggtgttctcggacaactcctctccaccagcagtgccccagagcttccaggtggctccctgcatgctcccaccggcagcggtaaaagcaccaaggtcccggccgcatacgctgctcagggctacaaggtgctagtgctcaacccctctgttgccgcaacactggcctttggcgcttacatgtccaggcccatggggtcgatcctaatgtcaggaccggggtgagaacaattaccactggcagcccaatcacgtactccacctacggcaagttccttgctgacggcgggtgctcggggggtgcctatgacataataatttgtgacggtgccactccacggatgccacgtccatcttgggcatcggcactgtccttgaccaagcagagaccgcgggggcgaggctggttgtgctcgccaccgctacccctccgggctccgtcaccgtgccccatctaacatcgaggaggttgctctgtccaccaccggagaggtccccttttacggcaaggctatccccctcgaggtaatcaagggggggagacatctcatcttctgtcactcaaaaaagaagtgcgacgagctcgccgcaaagcggtcgcgttgggcatcaatgccgtggcctactaccgtggccttgacgtgtctgtcatcccgaccagcggcgatgttgtcgtcgtggcgaccgatgctctcatgaccggctatactggcgacttcgaccggtgatagactgcaacacgtgtgtcacccaaacagtcgacttcagccttgaccctaccttcaccattgagacaaccacgctcccccaggatgctgtctcccgtactcaacgccggggcaggaccggcagggggaagtcagcatctacagattcgtggcaccaggggagcgcccttccggcatgttcgactcgtccgtcctctgtgagtgctatgacgcgggctgtgcttggtatgagctcacgcccgctgagaccactgttaggctagagcgtacatgaacaccccggggcttcctgtgtgccaggaccatcttgagttttgggagggcgtttttacaggcctcacccacatagatgcccactttctatcccagacaaagcagagtggggagaaccttccttacctggagcgtaccaggccaccgtgtgcgctagggctcaagcccctcccccatcgtgggaccagatgtggaagtgtttgatccgcctcaagcccaccctccatgggccaacacctctgctatacagactgggcctgttcagaatgaagtcaccttgacgcacccagtcaccaaatacatcatgacatgca

SEQ ID NO: 572 - DNA, 4867 bp, Hepatitis C virus
accaaccgtcgcccacaggacgtcaagttcccgggtggcggtcagatcgttggtggagtttacttgttgccgcgcaggggccctagattgggtgtgcgcgcgacgaggaagacttccgagcggtcgcacctcgtggtagacgtcagcctatccccaaggcacgtcggcccgagggcaggacctgggctcagcccgggtacccctggcccctctatggcaatgagggctgcgggtgggcgggatggctcctgtctcccgcggctctcggcctagttggggccccacggacccccggcgtaggtcgcgcaatttgggtaaggtcatcgataccctcacatgcggcttcgccgacctcatggggtacataccgctcgtcggcgcccctcttggaggcgtgccagggccctggcgcatggcgtccgggttctggaagacggcgtgaactatgcaacagggaatcttcctggttgctctttctctatcttccttctggctctgctctcttgcctgactgtgcccgctcagcctaccaagtgcgcaactctacggggctttaccatgtcaccaatgattgccctaactcgagcattgtgtacgaggcggccgatgccatcctgcacactccggggtgtgtcccttgcttccgcgagggtaactcctcgagtgttgggtggcggtgacccccacggtagccactaaggacggcaagctccccacaaggcagcttcgacgtcacatcgatctgcttgtcgggagcgccaccctctgctcggccctctacgtgggggactgtgcgggtccgtctttcttgtcggtcagctgttcaccttctctcccaggcgccactggacgacgcaagactgcaattgttctatctatcccggccatataacgggtcaccgcatggcgtgggatatgatgatgaactggtccctacggcggcattggtagtagctcagctgctccggatcccacaagccatcttggacatgatcgccggtgctcactggggagtcctggcgggcatggcgtatttctccatggtggggaactgggcgaggtcttggtagtgctgctgctatttgccggcgtcgacgcgcaaacccgcgtcaccgggggaagtgtcgcctacaccacggctggtattgctaggtttttccaaccaggcgccaagcagaacatccagctgatcaacaccacggcagttggcacatcaatagcacggccttgaactgcaatgcaagccttgaaaccggctggttagcaggacttttctatcacaacagattcaactcttcaggctgtcctgagaggttggccagctgcgaagccttgccgactttgaccagggctggggccccatcagccatgccaatggaagcggccccgaccaccgcccctactgctggcactaccccccaaaaccttgtggtattgtgcccgcaaagaacgtgtgtggcccggtatttgcttcacccccagccccgtggtggtgggaacgaccgacagggcgggtgcgcctacctacaactggggcgcaaatgaaacggacgtcttcgtccttaacaacaccaggccaccgcagggcaattggtcggttgtacctggatgaactcaaccgggttcaccaaagtgtgcggagcgcccccttgtgccatcggaggggtgggcaacaacaccttgcactgccccactgattgtttccgcaagcatccggaagccacgtactctcggtcggttctggtccctggatcacacccaggtgcatggtccactacccgtataggctctggcattatccctgtaccatcaactacactttatttaaagtcaggatgtacgtgggtggggtcgagcacaggtggaagctgcctgcaactggacgcggggcgaacgttgtgatctggaagacagggacaggtctgagcttagcccgttgctgctgtccaccacacagtggcaggtcctcccatgttcctttacgaccctgccagccttgtccacggcctcatccacctccaccagaacattgtggacgtgcagtatttgtacggggtggggtcaagcatcgcgtcctgggccattaaatgggagtacgtcgtcctcctgttccttctgctcgcagacgcagcgtctgctcttgcttgtggatgatgttactcatatcccaagcggaggcggctttggagaacctcgtggtactcaatgcagcatccctggccgggacgcacggtcttgtacccttcctcgtgttcttctgctttgcgtggtcctgaagggtaggtgggtgcccggagcggtctacgccctctacgggatgtggcctctcctcctgctcttgttggcgttgccccagcgagcatacgcactggacacggaggtggccgcgtcgtgtggcgcgttgttcttgtcgggttgatggcgctgactctgtcaccatattacaagcactatatcagctggtgcatgtggtggcttcagtactttctgaccagagcagaagcgcaactgcacgtgtgggttccccctctcaacgtccaggggggcgtgacgccgtcatcttactcacgtgtgttgtacacccgactttggtatttgacatcaccaaactactcctggccgttatcgggcccctttggatccttcaagccagtttgcttaaagtacctacttcgtgcgcgttcagggccttctccgaatctgcgcactagcgcggaaaatggccggaggccattacgtgcaaatggccatcatcaagttaggggcgcttactggcacctatgtctacaaccatctcactccccttcagactgggcgcacaacggcctgcgagatctggccgtggctgtggagccagtcgtcttctcccaaatggagaccaagctcatcacgtggggggcagacaccgccgcgtgcggtgacatcatcgacggctgcccgtctccgcccgtaggggccgggagatattgctcgggccggccgatggaatggtctccaaggggtggaggttgctggcgcccatcacagcgtacgcccagcagacaaggggcctcctagggtgtataatcaccagccgactggccgggacaaaaaccaagcggagggtgaggtccagattgtgtcaactgctgcccaaactttcctggcaacgtgcatcaatggggtatgctggactgtctaccacggggccggaacgaggaccttgcatcacccaagggtcctgttattcagatgtacaccaatgtggacaaagacctcgtgggctggcccgcccctcaaggtacccgctcattgacaccctgcacctgcggctcctcggacctttacttggtcacgaggcacgcgatgtcattcccgtgcgccggcgaggtgatagcagaggcagcctactttcgccccggcccatttcctacttgaaaggctcctcggggggtccactgttgtgccccgcggggcacgccgtgggcatatcagggccgcggtgtgcacccgtggagtggctaaagcggtggactttatccctgtggagaacctagagacaaccatgaggtccccggtgttctcggacaactcctctccaccagcagtgccccagagcttccaggtggctccctgcatgctcccaccggcagcggtaaaagcaccaaggtcccggccgcatacgctgctcagggctacaaggtgctagtgctcaacccctctgttgccgcaacactggcctttggcgcttacatgtccaggcccatggggtcgatcctaatgtcaggaccggggtgagaacaattaccactggcagcccaatcacgtactccacctacggcaagttccttgctgacggcgggtgctcggggggtgcctatgacataataatttgtgacggtgccactccacggatgccacgtccatcttgggcatcggcactgtccttgaccaagcagagaccgcgggggcgaggctggttgtgctcgccaccgctacccctccgggctccgtcaccgtgccccatctaacatcgaggaggttgctctgtccaccaccggagaggtccccttttacggcaaggctatccccctcgaggtaatcaagggggggagacatctcatcttctgtcactcaaaaaagaagtgcgacgagctcgccgcaaagcggtcgcgttgggcatcaatgccgtggcctactaccgtggccttgacgtgtctgtcatcccgaccagcggcgatgttgtcgtcgtggcgaccgatgctctcatgaccggctatactggcgacttcgaccggtgatagactgcaacacgtgtgtcacccaaacagtcgacttcagccttgaccctaccttcaccattgagacaaccacgctcccccaggatgctgtctcccgtactcaacgccggggcaggaccggcagggggaagtcagcatctacagattcgtggcaccaggggagcgcccttccggcatgttcgactcgtccgtcctctgtgagtgctatgacgcgggctgtgcttggtatgagctcacgcccgctgagaccactgttaggctagagcgtacatgaacaccccggggcttcctgtgtgccaggaccatcttgagttttgggagggcgtttttacaggcctcacccacatagatgcccactttctatcccagacaaagcagagtggggagaaccttccttacctggagcgtaccaggccaccgtgtgcgctagggctcaagcccctcccccatcgtgggaccagatgtggaagtgtttgatccgcctcaagcccaccctccatgggccaacacctctgctatacagactgggcctgttcagaatgaagtcaccttgacgcacccagtcaccaaatacatcatgacatgca

SEQ ID NO: 573 - DNA, 4867 bp, Hepatitis C virus; identical to SEQ ID NO: 566

SEQ ID NO: 574 - DNA, 4867 bp, Hepatitis C virus
accaaccgtcgcccacaggacgtcaagttcccgggtggcggtcagatcgttggtggagtttacttgttgccgcgcaggggccctagattgggtgtgcgcgcgacgaggaagacttccgagcggtcgcacctcgtggtagacgtcagcctatccccaaggcacgtcggcccgagggcaggacctgggctcagcccgggtacccctggcccctctatggcaatgagggctgcgggtgggcgggatggctcctgtctcccgcggctctcggcctagttggggccccacggacccccggcgtaggtcgcgcaatttgggtaaggtcatcgataccctcacatgcggcttcgccgacctcatggggtacataccgctcgtcggcgcccctcttggaggcgtgccagggccctggcgcatggcgtccgggttctggaagacggcgtgaactatgcaacagggaatcttcctggttgctctttctctatcttccttctggctctgctctcttgcctgactgtgcccgctcagcctaccaagtgcgcaactctacggggctttaccatgtcaccaatgattgccctaactcgagcattgtgtacgaggcggccgatgccatcctgcacactccggggtgtgtcccttgcgtccgcgagggtaactcctcgagtgttgggtggcggtgacccccacggtagccactaaggacggcaagctccccacaaggcagcttcgacgtcacatcgatctgcttgtcgggagcgccaccctctgctcggccctctacgtgggggactgagcgggtccgtctttcttgtcggtcagctgttcaccttctctcccaggcgccactggacgacgcaagactgcaattgttctatctatcccggccatataacgggtcaccgcatggcgtgggatatgatgatgaactggtccctacggcggcattggtagtagctcagctgctccggatcccacaagccatcttggacatgatcgccggtgctcactggggagtcctggcgggcatggcgtatttctccatggtggggaactgggcgaggtcttggtagtgctgctgctatttgccggcgtcgacgcgcaaacccgcgtcaccgggggaagtgtcgcctacaccacggctggtattgctaggtttttccaaccaggcgccaagcagaacatccagctgatcaacaccacggcagttggcacatcaatagcacggccttgaactgcaatgcaagccttgaaaccggctggttagcaggacttttctatcacaacagattcaactcttcaggctgtcctgagaggttggccagctgcgaagccttgccgactttgaccagggctggggccccatcagccatgccaatggaagcggccccgaccaccgcccctactgctggcactaccccccaaaaccttgtggtattgtgcccgcaaagaacgtgtgtggcccggtatttgcttcacccccagccccgtggtggtgggaacgaccgacagggcgggtgcgcctacctacaactggggcgcaaatgaaacggacgtcttcgtccttaacaacaccaggccaccgcagggcaattggtcggttgtacctggatgaactcaaccgggttcaccaaagtgtgcggagcgcccccttgtgccatcggaggggtgggcaacaacaccttgcactgccccactgattgtttccgcaagcatccggaagccacgtactctcggtcggttctggtccctggatcacacccaggtgcatggtccactacccgtataggctctggcattatccctgtaccatcaactacactttatttaaagtcaggatgtacgtgggtggggtcgagcacaggtggaagctgcctgcaactggacgcggggcgaacgttgtgatctggaagacagggacaggtctgagcttagcccgttgctgctgtccaccacacagtggcaggtcctcccatgttcctttacgaccctgccagccttgtccacggcctcatccacctccaccagaacattgtggacgtgcagtatttgtacggggtggggtcaagcatcgcgtcctgggccattaaatgggagtacgtcgtcctcctgttccttctgctcgcagacgcagcgtctgctcttgcttgtggatgatgttactcatatcccaagcggaggcggctttggagaacctcgtggtactcaatgcagcatccctggccgggacgcacggtcttgtacccttcctcgtgttcttctgctttgcgtggtcctgaagggtaggtgggtgcccggagcggtctacgccctctacgggatgtggcctctcctcctgctcttgttggcgttgccccagcgagcatacgcactggacacggaggtggccgcgtcgtgtggcgcgttgttcttgtcgggttgatggcgctgactctgtcaccatattacaagcactatatcagctggtgcatgtggtggcttcagtactttctgaccagagcagaagcgcaactgcacgtgtgggttccccctctcaacgtccaggggggcgtgacgccgtcatcttactcacgtgtgttgtacacccgactttggtatttgacatcaccaaactactcctggccgttatcgggcccctttggatccttcaagccagtttgcttaaagtacctacttcgtgcgcgttcagggccttctccgaatctgcgcactagcgcggaaaatggccggaggccattacgtgcaaatggccatcatcaagttaggggcgcttactggcacctatgtctacaaccatctcactccccttcagactgggcgcacaacggcctgcgagatctggccgtggctgtggagccagtcgtcttctcccaaatggagaccaagctcatcacgtggggggcagacaccgccgcgtgcggtgacatcatcgacggctgcccgtctccgcccgtaggggccgggagatattgctcgggccggccgatggaatggtctccaaggggtggaggttgctggcgcccatcacagcgtacgcccagcagacaaggggcctcctagggtgtataatcaccagccgactggccgggacaaaaaccaagcggagggtgaggtccagattgtgtcaactgctgcccaaactttcctggcaacgtgcatcaatggggtatgctggactgtctaccacggggccggaacgaggaccttgcatcacccaagggtcctgttattcagatgtacaccaatgtggacaaagacctcgtgggctggcccgcccctcaaggtacccgctcattgacaccctgcacctgcggctcctcggacctttacttggtcacgaggcacgcgatgtcattcccgtgcgccggcgaggtgatagcagaggcagcctactttcgccccggcccatttcctacttgaaaggctcctcggggggtccactgttgtgccccgcggggcacgccgtgggcatatcagggccgcggtgtgcacccgtggagtggctaaagcggtggactttatccctgtggagaacctagagacaaccatgaggtccccggtgttctcggacaactcctctccaccagcagtgccccagagcttccaggtggctccctgcatgctcccaccggcagcggtaaaagcaccaaggtcccggccgcatacgctgctcagggctacaaggtgctagtgctcaacccctctgttgccgcaacactggcctttggcgcttacatgtccaggcccatggggtcgatcctaatgtcaggaccggggtgagaacaattaccactggcagcccaatcacgtactccacctacggcaagttccttgctgacggcgggtgctcggggggtgcctatgacataataatttgtgacggtgccactccacggatgccacgtccatcttgggcatcggcactgtccttgaccaagcagagaccgcgggggcgaggctggttgtgctcgccaccgctacccctccgggctccgtcaccgtgccccatctaacatcgaggaggttgctctgtccaccaccggagaggtccccttttacggcaaggctatccccctcgaggtaatcaagggggggagacatctcatcttctgtcactcaaaaaagaagtgcgacgagctcgccgcaaagcggtcgcgttgggcatcaatgccgtggcctactaccgtggccttgacgtgtctgtcatcccgaccagcggcgatgttgtcgtcgtggcgaccgatgctctcatgaccggctatactggcgacttcgaccggtgatagactgcaacacgtgtgtcacccaaacagtcgacttcagccttgaccctaccttcaccattgagacaaccacgctcccccaggatgctgtctcccgtactcaacgccggggcaggaccggcagggggaagtcagcatctacagattcgtggcaccaggggagcgcccttccggcatgttcgactcgtccgtcctctgtgagtgctatgacgcgggctgtgcttggtatgagctcacgcccgctgagaccactgttaggctagagcgtacatgaacaccccggggcttcctgtgtgccaggaccatcttgagttttgggagggcgtttttacaggcctcacccacatagatgcccactttctatcccagacaaagcagagtggggagaaccttccttacctggagcgtaccaggccaccgtgtgcgctagggctcaagcccctcccccatcgtgggaccagatgtggaagtgtttgatccgcctcaagcccaccctccatgggccaacacctctgctatacagactgggcctgttcagaatgaagtcaccttgacgcacccagtcaccaaatacatcatgacatgca

SEQ ID NO: 575 - DNA, 4868 bp, Hepatitis C virus
accaaccgtcgcccacaggacgtcaagttcccgggtggcggtcagatcgttggtggagtttacttgttgccgcgcaggggccctagattgggtgtgcgcgcgacgaggaagacttccgagcggtcgcacctcgtggtagacgtcagcctatccccaaggcacgtcggcccgagggcaggacctgggctcagcccgggtacccctggcccctctatggcaatgagggctgcgggtgggcgggatggctcctgtctcccgcggctctcggcctagttggggccccacggacccccggcgtaggtcgcgcaatttgggtaaggtcatcgataccctcacatgcggcttcgccgacctcatggggtacataccgctcgtcggcgcccctcttggaggcgtgccagggccctggcgcatggcgtccgggttctggaagacggcgtgaactatgcaacagggaatcttcctggttgctctttctctatcttccttctggctctgctctcttgcctgactgtgcccgctcagcctaccaagtgcgcaactctacggggctttaccatgtcaccaatgattgccctaactcgagcattgtgtacgaggcggccgatgccatcctgcacactccggggtgtgtcccttgcgtccgcgagggtaactcctcgagtgttgggtggcggtgacccccacggtagccactaaggacggcaagctccccacaaggcagcttcgacgtcacatcgatctgcttgtcgggagcgccaccctctgctcggccctctacgtgggggactgtgcgggtccgtctttcttgtcggtcagctgttcaccttctctcccaggcgccactggacgacgcaagactgcaattgttctatctatcccggccatataacgggtcaccgcatggcgtgggatatgatgatgaactggtccctacggcggcattggtagtagctcagctgctccggatcccacaagccatcttggacatgatcgccggtgctcactggggagtcctggcgggcatggcgtatttctccatggtggggaactgggcgaggtcttggtagtgctgctgctatttgccggcgtcgacgcgcaaacccgcgtcaccgggggaagtgtcgcctacaccacggctggtattgctaggtttttccaaccaggcgccaagcagaacatccagctgatcaacaccacggcagttggcacatcaatagcacggccttgaactgcaatgcaagccttgaaaccggctggttagcaggacttttctatcacaacagattcaactcttcaggctgtcctgagaggttggccagctgcgaagccttgccgactttgaccagggctggggccccatcagccatgccaatggaagcggccccgaccaccgcccctactgctggcactaccccccaaaaccttgtggtattgtgcccgcaaagaacgtgtgtggcccggtatttgcttcacccccagccccgtggtggtgggaacgaccgacagggcgggtgcgcctacctacaactggggcgcaaatgaaacggacgtcttcgtccttaacaacaccaggccaccgcagggcaattggtcggttgtacctggatgaactcaaccgggttcaccaaagtgtgcggagcgcccccttgtgccatcggaggggtgggcaacaacaccttgcactgccccactgattgtttccgcaagcatccggaagccacgtactctcggtcggttctggtccctggatcacacccaggtgcatggtccactacccgtataggctctggcattatccctgtaccatcaactacactttatttaaagtcaggatgtacgtgggtggggtcgagcacaggtggaagctgcctgcaactggacgcggggcgaacgttgtgatctggaagacagggacaggtctgagcttagcccgttgctgctgtccaccacacagtggcaggtcctcccatgttcctttacgaccctgccagccttgtccacggcctcatccacctccaccagaacattgtggacgtgcagtatttgtacggggtggggtcaagcatcgcgtcctgggccattaaatgggagtacgtcgtcctcctgttccttctgctcgcagacgcagcgtctgctcttgcttgtggatgatgttactcatatcccaagcggaggcggctttggagaacctcgtggtactcaatgcagcatccctggccgggacgcacggtcttgtacccttcctcgtgttcttctgctttgcgtggtcctgaagggtaggtgggtgcccggagcggtctacgccctctacgggatgtggcctctcctcctgctcttgttggcgttgccccagcgagcatacgcactggacacggaggtggccgcgtcgtgtggcgcgttgttcttgtcgggttgatggcgctgactctgtcaccatattacaagcactatatcagctggtgcatgtggtggcttcagtactttctgaccagagcagaagcgcaactgcacgtgtgggttccccctctcaacgtccaggggggcgtgacgccgtcatcttactcacgtgtgttgtacacccgactttggtatttgacatcaccaaactactcctggccgttatcgggcccctttggatccttcaagccagttttgcttaaagtccctacttcgtgcgcgttcagggccttctccgaatctgcgcactagcgcggaaaatggccggaggccattacgtgcaaatggccatcatcaagttaggggcgcttactggcacctatgtctacaaccatctcactccccttgagactgggcgcacaacggcctgcgagatctggccgtggctgtggagccagtcgtcttctcccaaatggagaccaagctcatcacgtggggggcagacaccgccgcgtgcggtgacatcatcgacggttgcccgtctccgcccgtaggggccgggagatattgctcgggccggccgatggaatggtctccaaggggtggaggttgctggcgcccatcacagcgtacgcccagcagacaaggggcctcctagggtgtataatcaccagctgactggccgggacaaaaaccaagcggagggtgaggtccagattgtgtcaactgctgcccaaactttcctggcaacgtgcatcaatggggtatgctggactgtctaccacggggccggaacgaggacattgcatcacccaagggtcctgttattcagatgtacaccaatgtggacaaagacctcgtgggctggcccgcccctcaaggtacccgctcattgacaccctgcacctgcggctcctcggacctttacttggtcacgaggcacccgatgtcattcccgtgcgccggcgaggtgatagcagaggcagcctactttcgccccggcccatttcctacttgaaaggctcctcggggggtccactgttgtgccccgcggggcacgccgtgggcatttcagggccgcggtgtgcacccgtggagtggctaaagcggtggactttatccctgtggagaacctagagacaaccatgaggtccccggtgttctcggacaactcctctccaccagcagtgccccagagcttccaggtggctacctgcatgctcccaccggcagcggtaaaagcaccaaggtcccggccgcatacgctgctcagggctacaaggtgctagtgctcaacccctctgttgccgcaacactggcctttggcgcttacatgtcaaggcccatggggtcgatcctaatgtcaggaccggggtgagaacaattaccactggcagcccaatcacgtactccacctacggcaagttccttgctgacggcgggtgctcggggggtgcctatgacataataatttgtgacagtgccactccacggatgccacgtccatcttgggcatcggcactgtccttgaccaagcagagaccgcgggggcgaggctggttgtgctcgccaccgctacccctccgggctccgtcaccgtgccccacctaacatcgaggaggttgctctgtccaccaccggagaggtccccttttacggcaaggctatccccctcgaggtaatcaagggggggagacatctcatcttctgtcactcaaaaaagaagtgcgacgagctcgccacaaagtggtcgcgttgggcatcaatgccgtggcctactaccgtggccttgacgtgtctgtcatcccgaccagcggcgatgttgtcgtcgtggcgaccgatgctctcatgaccggctatactggcgacttcgatcggtgatagactgcaacacgtgtgtcacccaaacagtcgacttcagccttgaccctaccttcaccattgagacaaccacgctcccccaggatgctgtctcccgtactcaacgccggggcaggaccggcagggggaagtcagcatctacagattcgtggcaccaggggagcgcccttccggcatgttcgactcgtccgtcctctgtgagtgctatgacgcgggctgtgcttggtatgagctcacgcccgctgagaccactgttaggctcgagcgtacatgaacaccccggggcttcctgtgtgccaggaccatcttgagttttgggagggcgtttttacaggcctcacccacatagatgcccactttctatcccagacaaagcagagtggggagaaccttccttacctgtagcgtaccaggccaccgtgtgcgctagggctcaagcccctcccccatcgtgggaccagatgtggaagtgtttgatccgcctcaagcccaccctccatgggccaacacctctgctatacagactggggctgttcagaatgaagtcaccttgacgcacccagtcaccaaatacatcatgacatgca

SEQ ID NO: 576 - DNA, 4867 bp, Hepatitis C virus; identical to SEQ ID NO: 566

SEQ ID NO: 577 - DNA, 4867 bp, Hepatitis C virus; identical to SEQ ID NO: 566

SEQ ID NO: 578 - DNA, 4868 bp, Hepatitis C virus
accaaccgtcgcccacaggacgtcaagttcccgggtggcggtcagatcgttggtggagtttacttgttgccgcgcaggggccctagattgggtgtgcgcgcgacgaggaagacttccgagcggtcgcacctcgtggtagacgtcagcctatccccaaggcacgtcggcccgagggcaggacctgggctcagcccgggtacccctggcccctctatggcaatgagggctgcgggtgggcgggatggctcctgtctcccgcggctctcggcctagttggggccccacggacccccggcgtaggtcgcgcaatttgggtaaggtcatcgataccctcacatgcggcttcgccgacctcatggggtacataccgctcgtcggcgcccctcttggaggcgtgccagggccctggcgcatggcgtccgggttctggaagacggcgtgaactatgcaacagggaatcttcctggttgctctttctctatcttccttctggctctgctctcttgcctgactgtgcccgctcagcctaccaagtgcgcaactctacggggctttaccatgtcaccaatgattgccctaactcgagcattgtgtacgaggcggccgatgccatcctgcacactccggggtgtgtcccttgcgtccgcgagggtaactcctcgagtgttgggtggcggtgacccccacggtagccactaaggacggcaagctccccacaaggcagcttcgacgtcacatcgatctgcttgtcgggagcgccaccctctgctcggccctctacgtgggggactgtgcgggtccgtctttcttgtcggtcagctgttcaccttctctcccaggcgccactggacgacgcaagactgcaattgttctatctatcccggccatataacgggtcaccgcatggcgtgggatatgatgatgaactggtccctacggcggcattggtagtagctcagctgctccggatcccacaagccatcttggacatgatcgccggtgctcactggggagtcctggcgggcatggcgtatttctccatggtggggaactgggcgaggtcttggtagtgctgctgctatttgccggcgtcgacgcgcaaacccgcgtcaccgggggaagtgtcgcctacaccacggctggtattgctaggtttttccaaccaggcgccaagcagaacatccagctgatcaacaccacggcagttggcacatcaatagcacggccttgaactgcaatgcaagccttgaaaccggctggttagcaggacttttctatcacaacagattcaactcttcaggctgtcctgagaggttggccagctgcgaagccttgccgactttgaccagggctggggccccatcagccatgccaatggaagcggccccgaccaccgcccctactgctggcactaccccccaaaaccttgtggtattgtgcccgcaaagaacgtgtgtggcccggtatttgcttcacccccagccccgtggtggtgggaacgaccgacagggcgggtgcgcctacctacaactggggcgcaaatgaaacggacgtcttcgtccttaacaacaccaggccaccgcagggcaattggtcggttgtacctggatgaactcaaccgggttcaccaaagtgtgcggagcgcccccttgtgccatcggaggggtgggcaacaacaccttgcactgccccactgattgtttccgcaagcatccggaagccacgtactctcggtcggttctggtccctggatcacacccaggtgcatggtccactacccgtataggctctggcattatccctgtaccatcaactacactttatttaaagtcaggatgtacgtgggtggggtcgagcacaggtggaagctgcctgcaactggacgcggggcgaacgttgtgatctggaagacagggacaggtctgagcttagcccgttgctgctgtccaccacacagtggcaggtcctcccatgttcctttacgaccctgccagccttgtccacggcctcatccacctccaccagaacattgtggacgtgcagtatttgtacggggtggggtcaagcatcgcgtcctgggccattaaatgggagtacgtcgtcctcctgttccttctgctcgcagacgcagcgtctgctcttgcttgtggatgatgttactcatatcccaagcggaggcggctttggagaacctcgtggtactcaatgcagcatccctggccgggacgcacggtcttgtacccttcctcgtgttcttctgctttgcgtggtcctgaagggtaggtgggtgcccggagcggtctacgccctctacgggatgtggcctctcctcctgctcttgttggcgttgccccagcgagcatacgcactggacacggaggtggccgcgtcgtgtggcgcgttgttcttgtcgggttgatggcgctgactctgtcaccatattacaagcactatatcagctggtgcatgtggtggcttcagtactttctgaccagagcagaagcgcaactgcacgtgtgggttccccctctcaacgtccaggggggcgtgacgccgtcatcttactcacgtgtgttgtacacccgactttggtatttgacatcaccaaactactcctggccgttatcgggcccctttggatccttcaagccagtttgcttaaagtacctacttcgtgcgcgttcagggccttctccgaatctgcgcactagcgcggaaaatggccggaggccattacgtgcaaatggccatcatcaagttaggggcgcttactggcacctatgtctacaaccatctcactccccttcagactgggcgcacaacggcctgcgagatctggccgtggctgtggagccagtcgtcttctcccaaatggagaccaagctcatcacgtggggggcagacaccgccgcgtgcggtgacatcatcgacggctgcccgtctccgcccgtaggggccgggagatattgctcgggccggccgatggaatggtctccaaggggtggaggttgctggcgcccatcacagcgtacgcccagcagacaaggggcctcctagggtgtataatcaccagccgactggccgggacaaaaaccaagcggagggtgaggtccagattgtgtcaactgctgcccaaactttcctggcaacgtgcatcaatggggtatgctggactgtctaccacggggccggaacgaggaccttgcatcacccaagggtcctgttattcagatgtacaccaatgtggacaaagacctcgtgggctggcccgcccctcaaggtacccgctcattgacaccctgcacctgcggctcctcggacctttacttggtcacgaggcacgcgatgtcattcccgtgcgccggcgaggtgatagcagaggcagcctactttcgccccggcccatttcctacttgaaaggctcctcggggggtccactgttgtgccccgcggggcacgccgtgggcatatcagggccgcggtgtgcacccgtggagtggctaaagcggtggactttatccctgtggagaacctagagacaaccatgaggtccccggtgttctcggacaactcctctccaccagcagtgccccagagcttccaggtggctccctgcatgctcccaccggcagcggtaaaagcaccaaggtcccggccgcatacgctgctcagggctacaaggtgctagtgctcaacccctctgttgccgcaacactggcctttggcgcttacatgtccaggcccatggggtcgatcctaatgtcaggaccggggtgagaacaattaccactggcagcccaatcacgtactccacctacggcaagttccttgctgacggcgggtgctcggggggtgcctatgacataataatttgtgacggtgccactccacggatgccacgtccatcttgggcatcggcactgtccttgaccaagcagagaccgcgggggcgaggctggttgtgctcgccaccgctacccctccgggctccgtcaccgtgccccatctaacatcgaggaggttgctctgtccaccaccggagaggtccccttttacggcaaggctatccccctcgaggtaatcaagggggggagacatctcatcttctgtcactcaaaaaaagaagtgcgacgagctcgccgcaaagtggtcgcgttgggcatcaatgccgtggcctactaccgtggccttgacgtgtctgtcatcccgaccagcggcgatgttgtcgtcgtggcgaccgatgctctcatgaccggctatactggcgacttcgatcggtgatagactgcaacacgtgtgtcacccaaacagtcgacttcagccttgaccctaccttcaccattgagacaaccacgctcccccaggatgctgtctcccgtactcaacgccggggcaggaccggcagggggaagtcagcatctacagattcgtggcaccaggggagcgcccttccggcatgttcgactcgtccgtcctctgtgagtgctatgacgcgggctgtgcttggtatgagctcacgcccgctgagaccactgttaggctcgagcgtacatgaacaccccggggcttcctgtgtgccaggaccatcttgagttttgggagggcgtttttacaggcctcacccacatagatgcccactttctatcccagacaaagcagagtggggagaaccttccttacctgtagcgtaccaggccaccgtgtgcgctagggctcaagcccctcccccatcgtgggaccagatgtggaagtgtttgatccgcctcaagcccaccctccatgggccaacacctctgctatacagactggggctgttcagaatgaagtcaccttgacgcacccagtcaccaaatacatcatgacatgca

SEQ ID NO: 579 - DNA, 4867 bp, Hepatitis C virus
accaaccgtcacccacaggacgtcaagttcccgggtggcggtcagatcgttggtggagtttacttgttgccgcgcaggggccctagattgggtgtgcgcgcgacgaggaagacttccgagcggtcgcacctcgtggtagacgtcagcctatccccaaggcacgtcggcccgagggcaggacctgggctcagcccgggtacccctggcccctctatggcaatgagggctgcgggtgggcgggatggctcctgtctcccgcggctctcggcctagttggggccccacggacccccggcgtaggtcgcgcaatttgggtaaggtcatcgataccctcacatgcggcttcgccgacctcatggggtacataccgctcgtcggcgcccctcttggaggcgtgccagggccctggcgcatggcgtccgggttctggaagacggcgtgaactatgcaacagggaatcttcctggttgctctttctctatcttccttctggctctgctctcttgcctgactgtgcccgctcagcctaccaagtgcgcaactctacggggctttaccatgtcaccaatgattgccctaactcgagcattgtgtacgaggcggccgatgccatcctgcacactccggggtgtgtcccttgcgtccgcgagggtaactcctcgagtgttgggtggcggtgacccccacggtagccactaaggacggcaagctccccacaaggcagcttcgacgtcacatcgatctgcttgtcgggagcgccaccctctgctcggccctctacgtgggggactgtgcgggtccgtctttcttgtcggtcagctgttcaccttctctcccaggcgccactggacgacgcaagactgcaattgttctatctatcccggccatataacgggtcaccgcatggcgtgggatatgatgatgaactggtccctacggcggcattggtagtagctcagctgctccggatcccacaagccatcttggacatgatcgccggtgctcactggggagtcctggcgggcatggcgtatttctccatggtggggaactgggcgaggtcttggtagtgctgctgctatttgccggcgtcgacgcgcaaacccgcgtcaccggggggagtgtcgcctacaccacggctggtattgctaggtttttccaaccaggcgccaagcagaacatccagctgatcaacaccacggcagttggcacatcaatagcacggccttgaactgcaatgcaagccttgaaaccggctggttagcaggacttttctatcacaacagattcaactcttcaggctgtcctgagaggttggccagctgcgaagccttgccgactttgaccagggctggggccccatcagccatgccaatggaagcggccccgaccaccgcccctactgctggcactaccccccaaaaccttgtggtattgtgcccgcaaagaacgtgtgtggcccggtatttgcttcacccccagccccgtggtggtgggaacgaccgacagggcgggtgcgcctacctacaactggggcgcaaatgaaacggacgtcttcgtccttaacaacaccaggccaccgcagggcaattggtcggttgtacctggatgaactcaaccgggttcaccaaagtgtgcggagcgcccccttgtgccatcggaggggtgggcaacaacaccttgcactgccccactgattgtttccgcaagcatccggaagccacgtactctcggtcggttctggtccctggatcacacccaggtgcatggtccactacccgtataggctctggcattatccctgtaccatcaactacactttatttaaagtcaggatgtacgtgggtggggtcgagcacaggtggaagctgcctgcaactggacgcggggcgaacgttgtgatctggaagacagggacaggtctgagcttagcccgttgctgctgtccaccacacagtggcaggtcctcccatgttcctttacgaccctgccagccttgtccacggcctcatccacctccaccagaacattgtggacgtgcagtatttgtacggggtggggtcaagcatcgcgtcctgggccattaaatgggagtacgtcgtcctcctgttccttctgctcgcagacgcagcgtctgctcttgcttgtggatgatgttactcatatctcaagcggaggcggctttggagaacctcgtggtactcaatgcagcatccctggccgggacgcacggtctcgtacccttcctcgtgttcttctgctttgcgtggtcctgaagggtaggtgggtgcccggagcggtctacgccctctacgggatgtggcctctcctcctgctcttgttggcgttgccccagcgagcatacgcactggacacggaggtggccgcgtcgtgtggcgcgttgttcttgtcgggttgatggcgctgactctgtcaccatattacaagcactatatcagctggtgcatgtggtggcttcagtactttctgaccagagcagaagcgcaactgcacgtgtgggttccccctctcaacgtccaggggggcgtgacgccgtcatcttactcacgtgtgttgtacacccgactttggtatttgacatcaccaaactactcctggccgttatcgggcccctttggatccttcaagccagtttgcttaaagtacctacttcgtgcgcgttcagggccttctccgaatctgcgcgctagcgcggaaaatggccggaggccattacgtgcaaatggccatcatcaagttaggggcgcttactggcacctatgtctacaaccatctcactccccttcagactgggcgcacaacggcctgcgagatctggccgtggctgtggagccagtcgtcttctcccaaatggagaccaagctcatcacgtggggggcagacaccgccgcgtgcggtgacatcatcgacggctgcccgtctccgcccgtaggggccgggagatattgctcgggccggccgatggaatggtctccaaggggtggaggttgctggcgcccatcacagcgtacgcccagcagacaaggggcctcctagggtgtataatcaccagccgactggccgggacaaaaaccaagcggagggtgaggtccagattgtgtcaactgctgcccaaactttcctggcaacgtgcatcaatggggtatgctggactgtctaccacggggccggaacgaggaccttgcatcacccaagggtcctgttattcagatgtacaccaatgtggacaaagacctcgtgggctggcccgcccctcaaggtacccgctcattgacaccctgcacctgcggctcctcggacctttacttggtcacgaggcacgcgatgtcattcccgtgcgccggcgaggtgatagcagaggcagcctactttcgccccggcccatttcctacttgaaaggctcctcggggggtccactgttgtgccccgcggggcacgccgtgggcatatcagggccgcggtgtgcacccgtggagtggctaaagcggtggactttatccctgtggagaacctagagacaaccatgaggtccccggtgttctcggacaactcctctccaccagcagtgccccagagcttccaggtggctccctgcatgctcccaccggcagcggtaaaagcaccaaggtcccggccgcatacgctgctcagggctacaaggtgctagtgctcaacccctctgttgccgcaacactggcctttggcgcttacatgtccaggcccatggggtcgatcctaatgtcaggaccggggtgagaacaattaccactggcagcccaatcacgtactccacctacggcaagttccttgctgacggcgggtgctcggggggtgcctatgacataataatttgtgacggtgccactccacggatgccacgtccatcttgggcatcggcactgtccttgaccaagcagagaccgcgggggcgaggctggttgtgctcgccaccgctacccctccgggctccgtcaccgtgccccatctaacatcgaggaggttgctctgtccaccaccggagaggtccccttttacggcaaggctatccccctcgaggtaatcaagggggggagacatctcatcttctgtcactcaaaaaagaagtgcgacgagctcgccgcaaagcggtcgcgttgggcatcaatgccgtggcctactaccgtggccttgacgtgtctgtcatcccgaccagcggcgatgttgtcgtcgtggcgaccgatgctctcatgaccggctatactggcgacttcgaccggtgatagactgcaacacgtgtgtcacccaaacagtcgacttcagccttgaccctaccttcaccattgagacaaccacgctcccccaggatgctgtctcccgtactcaacgccggggcaggaccggcagggggaagtcagcatctacagattcgtggcaccaggggagcgcccttccggcatgttcgactcgtccgtcctctgtgagtgctatgacgcgggctgtgcttggtatgagctcacgcccgctgagaccactgttaggctagagcgtacatgaacaccccggggcttcctgtgtgccaggaccatcttgagttttgggagggcgtttttacaggcctcacccacatagatgcccactttctatcccagacaaagcagagtggggagaaccttccttacctggagcgtaccaggccaccgtgtgcgctagggctcaagcccctcccccatcgtgggaccagatgtggaagtgtttgatccgcctcaagcccaccctccatgggccaacacctctgctatacagactgggcctgttcagaatgaagtcaccttgacgcacccagtcaccaaatacatcatgacatgca

SEQ ID NO: 580 - DNA, 4867 bp, Hepatitis C virus; identical to SEQ ID NO: 566

SEQ ID NO: 581 - DNA, 4867 bp, Hepatitis C virus; identical to SEQ ID NO: 566

SEQ ID NO: 582 - DNA, 4867 bp, Hepatitis C virus
accaaccgtcgcccacaggacgtcaagttcccgggtggcggtcagatcgttggtggagtttacttgttgccgcgcaggggccctagattgggtgtgcgcgcgacgaggaagacttccgagcggtcgcacctcgtggtagacgtcagcctatccccaaggcacgtcggcccgagggcaggacctgggctcagcccgggtacccctggcccctctatggcaatgagggctgcgggtgggcgggatggctcctgtctcccgcggctctcggcctagttggggccccacggacccccggcgtaggtcgcgcaatttgggtaaggtcatcgataccctcacatgcggcttcgccgacctcatggggtacataccgctcgtcggcgcccctcttggaggcgtgccagggccctggcgcatggcgtccgggttctggaagacggcgtgaactatgcaacagggaatcttcctggttgctctttctctatcttccttctggctctgctctcttgcctgactgtgcccgctcagcctaccaagtgcgcaactctacggggctttaccatgtcaccaatgattgccctaactcgagcattgtgtacgaggcggccgatgccatcctgcacactccggggtgtgtcccttgcgtccgcgagggtaactcctcgagtgttgggtggcggtgacccccacggtagccactaaggacggcaagctccccacaaggcagcttcgacgtcacatcgatctgcttgtcgggagcgccaccctctgctcggccctctacgtgggggactgtgcgggtccgtctttcttgtcggtcagctgttcaccttctctcccaggcgccactggacgacgcaagactgcaattgttctatctatcccggccatataacgggtcaccgcatggcgtgggatatgatgatgaactggtccctacggcggcattggtagtagctcagctgctccggatcccacaagccatcttggacatgatcgccggtgctcactggggagtcctggcgggcatggcgtatttctccatggtggggaactgggcgaggtcttggtagtgctgctgctatttgccggcgtcgacgcgcaaacccgcgtcaccgggggaagtgtcgcctacaccacggctggtattgctaggtttttccaaccaggcgccaagcagaacatccagctgatcaacaccacggcagttggcacatcaatagcacggccttgaactgcaatgcaagccttgaaaccggctggttagcaggacttttctatcacaacagattcaactcttcaggctgtcctgagaggttggccagctgcgaagccttgccgactttgaccagggctggggccccatcagccatgccaatggaagcggccccgaccaccgcccctactgctggcactaccccccaaaaccttgtggtattgtgcccgcaaagaacgtgtgtggtccggtatttgcttcacccccagccccgtggtggtgggaacgaccgacagggcgggtgcgcctacctacaactggggcgcaaatgaaacggacgtcttcgtccttaacaacaccaggccaccgcagggcaattggtcggttgtacctggatgaactcaaccgggttcaccaaagtgtgcggagcgcccccttgtgccatcggaggggtgggcaacaacaccttgcactgccccactgattgtttccgcaagcatccggaagccacgtactctcggtcggttctggtccctggatcacacccaggtgcatggtccactacccgtataggctctggcattatccctgtaccatcaactacactttatttaaagtcaggatgtacgtgggtggggtcgagcacaggtggaagctgcctgcaactggacgcggggcgaacgttgtgatctggaagacagggacaggtctgagcttagcccgttgctgctgtccaccacacagtggcaggtcctcccatgttcctttacgaccctgccagccttgtccacggcctcatccacctccaccagaacattgtggacgtgcagtatttgtacggggtggggtcaagcatcgcgtcctgggccattaaatgggagtacgtcgtcctcctgttccttctgctcgcagacgcagcgtctgctcttgcttgtggatgatgttactcatatcccaagcggaggcggctttggagaacctcgtggtactcaatgcagcatccctggccgggacgcacggtcttgtacccttcctcgtgttcttctgctttgcgtggtcctgaagggtaggtgggtgcccggagcggtctacgccctctacgggatgtggcctctcctcctgctcttgttggcgttgccccagcgagcatacgcactggacacggaggtggccgcgtcgtgtggcgcgttgttcttgtcgggttgatggcgctgactctgtcaccatattacaagcactatatcagctggtgcatgtggtggcttcagtactttctgaccagagcagaagcgcaactgcacgtgtgggttccccctctcaacgtccaggggggcgtgacgccgtcatcttactcacgtgtgttgtacacccgactttggtatttgacatcaccaaactactcctggccgttatcgggcccctttggatccttcaagccagtttgcttaaagtacctacttcgtgcgcgttcagggccttctccgaatctgcgcactagcgcggaaaatggccggaggccattacgtgcaaatggccatcatcaagttaggggcgcttactggcacctatgtctacaaccatctcactccccttcagactgggcgcacaacggcctgcgagatctggccgtggctgtggagccagtcgtcttctcccaaatggagaccaagctcatcacgtggggggcagacaccgccgcgtgcggtgacatcatcgacggctgcccgtctccgcccgtaggggccgggagatattgctcgggccggccgatggaatggtctccaaggggtggaggttgctggcgcccatcacagcgtacgcccagcagacaaggggcctcctagggtgtataatcaccagccgactggccgggacaaaaaccaagcggagggtgaggtccagattgtgtcaactgctgcccaaactttcctggcaacgtgcatcaatggggtatgctggactgtctaccacggggccggaacgaggaccttgcatcacccaagggtcctgttattcagatgtacaccaatgtggacaaagacctcgtgggctggcccgcccctcaaggtacccgctcattgacaccctgcacctgcggctcctcggacctttacttggtcacgaggcacgcgatgtcattcccgtgcgccggcgaggtgatagcagaggcagcctactttcgccccggcccatttcctacttgaaaggctcctcggggggtccactgttgtgccccgcggggcacgccgtgggcatatcagggccgcggtgtgcacccgtggagtggctaaagcggtggactttatccctgtggagaacctagagacaaccatgaggtccccggtgttctcggacaactcctctccaccagcagtgccccagagcttccaggtggctccctgcatgctcccaccggcagcggtaaaagcaccaaggtcccggccgcatacgctgctcagggctacaaggtgctagtgctcaacccctctgttgccgcaacactggcctttggcgcttacatgtccaggcccatggggtcgatcctaatgtcaggaccggggtgagaacaattaccactggcagcccaatcacgtactccacctacggcaagttccttgctgacggcgggtgctcggggggtgcctatgacataataatttgtgacggtgccactccacggatgccacgtccatcttgggcatcggcactgtccttgaccaagcagagaccgcgggggcgaggctggttgtgctcgccaccgctacccctccgggctccgtcaccgtgccccatctaacatcgaggaggttgctctgtccaccaccggagaggtccccttttacggcaaggctatccccctcgaggtaatcaagggggggagacatctcatcttctgtcactcaaaaaagaagtgcgacgagctcgccgcaaagcggtcgcgttgggcatcaatgccgtggcctactaccgtggccttgacgtgtctgtcatcccgaccagcggcgatgttgtcgtcgtggcgaccgatgctctcatgaccggctatactggcgacttcgaccggtgatagactgcaacacgtgtgtcacccaaacagtcgacttcagccttgaccctaccttcaccattgagacaaccacgctcccccaggatgctgtctcccgtactcaacgccggggcaggaccggcagggggaagtcagcatctacagattcgtggcaccaggggagcgcccttccggcatgttcgactcgtccgtcctctgtgagtgctatgacgcgggctgtgcttggtatgagctcacgcccgctgagaccactgttaggctagagcgtacatgaacaccccggggcttcctgtgtgccaggaccatcttgagttttgggagggcgtttttacaggcctcacccacatagatgcccactttctatcccagacaaagcagagtggggagaaccttccttacctggagcgtaccaggccaccgtgtgcgctagggctcaagcccctcccccatcgtgggaccagatgtggaagtgtttgatccgcctcaagcccaccctccatgggccaacacctctgctatacagactgggcctgttcagaatgaagtcaccttgacgcacccagtcaccaaatacatcatgacatgca

SEQ ID NO: 583 - DNA, 4867 bp, Hepatitis C virus
accaaccgtcgcccacaggacgtcaagttcccgggtggcggtcagatcgttggtggagtttacttgttgccgcgcaggggccctagattgggtgtgcgcgcgacgaggaagacttccgagcggtcgcacctcgtggtagacgtcagcctatccccaaggcacgtcggcccgagggcaggacctgggctcagcccgggtacccctggcccctctatggcaatgagggctgcgggtgggcgggatggctcctgtctcccgcggctctcggcctagttggggccccacggacccccggcgtaggtcgcgcaatttgggtaaggtcatcgataccctcacatgcggcttcgccgacctcatggggtacataccgctcgtcggcgcccctcttggaggcgtgccagggccctggcgcatggcgtccgggttctggaagacggcgtgaactatgcaacagggaatcttcctggttgctctttctctatcttccttctggctctgctctcttgcctgactgtgcccgctcagcctaccaagtgcgcaactctacggggctttaccatgtcaccaatgattgccctaactcgagcattgtgtacgaggcggccgatgccatcctgcacactccggggtgtgtcccttgcgtccgcgagggtaactcctcgagtgttgggtggcggtgacccccacggtagccactaaggacggcaagctccccacaaggcagcttcgacgtcacatcgatctgcttgtcgggagcgccaccctctgctcggccctctacgtgggggactgtgcgggtccgtctttcttgtcggtcagctgttcaccttctctcccaggcgccactggacgacgcaagactgcaattgttctatctatcccggccatataacgggtcaccgcatggcgtgggatatgatgatgaactggtccctacggcggcattggtagtagctcagctgctccggatcccacaagccatcttggacatgatcgccggtgctcactggggagtcctggcgggcatggcgtatttctccatggtgggaaactgggcgaggtcttggtagtgctgctgctatttgccggcgtcgacgcgcaaacccgcgtcaccgggggaagtgtcgcctacaccacggctggtattgctaggtttttccaaccaggcgccaagcagaacatccagctgatcaacaccacggcagttggcacatcaatagcacggccttgaactgcaatgcaagccttgaaaccggctggttagcaggacttttctatcacaacagattcaactcttcaggctgtcctgagaggttggccagctgcgaagccttgccgactttgaccagggctggggccccatcagccatgccaatggaagcggccccgaccaccgcccctactgctggcactaccccccaaaaccttgtggtattgtgcccgcaaagaacgtgtgtggcccggtatttgcttcacccccagccccgtggtggtgggaacgaccgacagggcgggtgcgcctacctacaactggggcgcaaatgaaacggacgtcttcgtccttaacaacaccaggccaccgcagggcaattggtcggttgtacctggatgaactcaaccgggttcaccaaagtgtgcggagcgcccccttgtgccatcggaggggtgggcaacaacaccttgcactgccccactgattgtttccgcaagcatccggaagccacgtactctcggtcggttctggtccctggatcacacccaggtgcatggtccactacccgtataggctctggcattatccctgtaccatcaactacactttatttaaagtcaggatgtacgtgggtggggtcgagcacaggtggaagctgcctgcaactggacgcggggcgaacgttgtgatctggaagacagggacaggtctgagcttagcccgttgctgctgtccaccacacagtggcaggtcctcccatgttcctttacgaccctgccagccttgtccacggcctcatccacctccaccagaacattgtggacgtgcagtatttgtacggggtggggtcaagcatcgcgtcctgggccattaaatgggagtacgtcgtcctcctgttccttctgctcgcagacgcagcgtctgctcttgcttgtggatgatgttactcatatcccaagcggaggcggctttggagaacctcgtggtactcaatgcagcatccctggccgggacgcacggtcttgtacccttcctcgtgttcttctgctttgcgtggtcctgaagggtaggtgggtgcccggagcggtctacgccctctacgggatgtggcctctcctcctgctcttgttggcgttgccccagcgagcatacgcactggacacggaggtggccgcgtcgtgtggcgcgttgttcttgtcgggttgatggcgctgactctgtcaccatattacaagcactatatcagctggtgcatgtggtggcttcagtactttctgaccagagcagaagcgcaactgcacgtgtgggttccccctctcaacgtccaggggggcgtgacgccgtcatcttactcacgtgtgttgtacacccgactttggtatttgacatcaccaaactactcctggccgttatcgggcccctttggatccttcaagccagtttgcttaaagtacctacttcgtgcgcgttcagggccttctccgaatctgcgcactagcgcggaaaatggccggaggccattacgtgcaactggccatcatcaagttaggggcgcttactggcacctatgtctacaaccatctcactccccttcagactgggcgcacaacggcctgcgagatctggccgtggctgtggagccagtcgtcttctcccaaatggagaccaagctcatcacgtggggggcagacaccgccgcgtgcggtgacatcatcgacggctgcccgtctccgcccgtaggggccgggagatattgctcgggccggccgatggaatggtctccaaggggtggaggttgctggcgcccatcacagcgtacgcccagcagacaaggggcctcctagggtgtataatcaccagcctactggccgggacaaaaaccaagcggagggtgaggtccagattgtgtcaactgctgcccaaactttcctggcaacgtgcatcaatggggtatgctggactgtctaccacggggccggaacgaggaccttgcatcacccaagggtcctgttattcagatgtacaccaatgtggacaaagacctcgtgggctggcccgcccctcaaggtacccgctcattgacaccctgcacctgcggctcctcggacctttacttggtcacgaggcacgcgatgtcattcccgtgcgccggcgaggtgatagcagaggcagcctactttcgccccggcccatttcctacttgaaaggctcctcggggggtccactgttgtgccccgcggggcacgccgtgggcatatcagggccgcggtgtgcacccgtggagtggctaaagcggtggactttatccctgtggagaacctagagacaaccatgaggtccccggtgttctcggacaactcctctccaccagcagtgccccagagcttccaggtggctccctgcatgctcccaccggcagcggtaaaagcaccaaggtcccggccgcatacgctgctcagggctacaaggtgctagtgctcaacccctctgttgccgcaacactggcctttggcgcttacatgtccaggcccatggggtcgatcctaatgtcaggaccggggtgagaacaattaccactggcagcccaatcacgtactccacctacggcaagttccttgctgacggcgggtgctcggggggtgcctatgacataataatttgtgacggtgccactccacggatgccacgtccatcttgggcatcggcactgtccttgaccaagcagagaccgcgggggcgaggctggttgtgctcgccaccgctacccctccgggctccgtcaccgtgccccatctaacatcgaggaggttgctctgtccaccaccggagaggtccccttttacggcaaggctatccccctcgaggtaatcaagggggggagacatctcatcttctgtcactcaaaaaagaagtgcgacgagctcgccgcaaagcggtcgcgttgggcatcaatgccgtggcctactaccgtggccttgacgtgtctgtcatcccgaccagcggcgatgttgtcgtcgtggcgaccgatgctctcatgaccggctatactggcgacttcgaccggtgatagactgcaacacgtgtgtcacccaaacagtcgacttcagccttgaccctaccttcaccattgagacaaccacgctcccccaggatgctgtctcccgtactcaacgccggggcaggaccggcagggggaagtcagcatctacagattcgtggcaccaggggagcgcccttccggcatgttcgactcgtccgtcctctgtgagtgctatgacgcgggctgtgcttggtatgagctcacgcccgctgagaccactgttaggctagagcgtacatgaacaccccggggcttcctgtgtgccaggaccatcttgagttttgggagggcgtttttacaggcctcacccacatagatgcccactttctatcccagacaaagcagagtggggagaaccttccttacctggagcgtaccaggccaccgtgtgcgctagggctcaagcccctcccccatcgtgggaccagatgtggaagtgtttgatccgcctcaagcccaccctccatgggccaacacctctgctatacagactgggcctgttcagaatgaagtcaccttgacgcacccagtcaccaaatacatcatgacatgca

SEQ ID NO: 584 - DNA, 4867 bp, Hepatitis C virus; identical to SEQ ID NO: 566

SEQ ID NO: 585 - DNA, 4865 bp, Hepatitis C virus
accaaccgtcgcccacaggacgtcaagttcccgggtggcggtcagatcgttggtggagtttacttgttgccgcgcaggggccctagattgggtgtgcgcgcgacgaggaagacttccgagcggtcgcacctcgtggtagacgtcagcctatccccaaggcacgtcggcccgagggcaggacctgggctcagcccgggtacccctggcccctctatggcaatgagggctgcgggtgggcgggatggctcctgtctcccgcggctctcggcctagttggggccccacggacccccggcgtaggtcgcgcaatttgggtaaggtcatcgataccctcacatgcggcttcgccgacctcatggggtacataccgctcgtcggcgcccctcttggaggcgtgccagggccctggcgcatggcgtccgggttctggaagacggcgtgaactatgcaacagggaatcttcctggttgctctttctctatcttccttctggctctgctctcttgcctgactgtgcccgctcagcctaccaagtgcgcaactctacggggctttaccatgtcaccaatgattgccctaactcgagcattgtgtacgaggcggccgatgccatcctgcacactccggggtgtgtcccttgcgtccgcgagggtaactcctcgagtgttgggtggcggtgacccccacggtagccactaaggacggcaagctccccacaaggcagcttcgacgtcacatcgatctgcttgtcgggagcgccaccctctgctcggccctctacgtgggggactgtgcgggtccgtctttcttgtcggtcagctgttcaccttctctcccaggcgccactggacgacgcaagactgcaattgttctatctatcccggccatataacgggtcaccgcatggcgtgggatatgatgatgaactggtccctacggcggcattggtagtagctcagctgctccggatcccacaagccatcttggacatgatcgccggtgctcactggggagtcctggcgggcatggcgtatttctccatggtggggaactgggcgaggtcttggtagtgctgctgctatttgccggcgtcgacgcgcaaacccgcgtcaccgggggaagtgtcgcctacaccacggctggtattgctaggtttttccaaccaggcgccaagcagaacatccagctgatcaacaccacggcagttggcacatcaatagcacggccttgaactgcaatgcaagccttgaaaccggctggttagcaggacttttctatcacaacagattcaacttttcaggctgtcctgagaggttggccagctgcgaagccttgccgactttgaccagggctggggccccatcagccatgccaatggaagcggccccgaccaccgcccctactgctggcactaccccccaaaaccttgtggtattgtgcccgcaaagaacgtgtgtggcccggtatttgcttcacccccagccccgtggtggtgggaacgaccgacagggcgggtgcgcctacctacaactggggcgcaaatgaaacggacgtcttcgtccttaacaacaccaggccaccgcagggcaattggtcggttgtacctggatgaactcaaccgggttcaccaaagtgcggagcgcccccttgtgccatcggaggggtgggcaacaacaccttgcactgccccactgattgtttccgcaagcatccggaagccacgtactctcggtgcgttctggtccctggatcacacccaggtgcatggtccactacccgtataggctctggcattatccctgtaccatcaactacactttatttaaagtcaggatgtacgtgggtggggtcgagcacaggctgaagctgcctgcaactggacgcggggcgaacgttgtgatctggaagacagggacaggtctgagcttagcccgttgctgctgtccaccacacagtggcaggtcctcccatgttcctttacgaccctgccagccttgtccaccgcctcatccacctccaccagaacattgtggacgtgcagtatttgtacggggtggggtcaagcatcgcgtcctgggccattaaatgggagtacgtcgtcctcctgttccttctgctcgcagacgcacggtctgctcttgcttgtggatgatgttactcatatcccaagcggaggcggctttggagaacctcgtggtactcaatgcagcatccctggccgggacgcacggtctcgtacccttcctcgtgttcttctgctttgcgtggtactgaagggtaggtgggtccccggagcggtctacgccctctacgggatgtggcctctcctcctgctcttgttggcgttgccccagcgagcatacgcactggacacggaggtggccgcgtcgtgtggcgggttgttcttgtcgggttgatggcgctgactctgtcaccatattacaagcactatatcagctggtgcatgtggtggcttcagtactttctgaccagagcagaagcgcaactgcacgtgtgggttccccctctcaacgtccgagggggcgtgacgccgtcatcttactcacgtgtgttgtacacccgactttggtatttgacatcaccaaactactcctggccgttatcgggcccctttggatccttcaagccagtttgcttaaagtacctacttcgtgcgcgttcagggccttctccgaatctgcgcactagcgcggaaaatggccggaggccattacgtgcaaatggccatcatcaagttaggggcgcttactggcacctatgtctacaaccatctcactccccttcgaactgggcgcacaacggcctgcgagatctggccgtggctgtggagccagtcgtcttctcccaaatggagaccaagctcatcacgtggggggcagacaccgccgcgtgcggtgacatcatcgacggcttcccgtctccgcccgtaggggccgggagatattgctcgggccggccgatggaatggtctccaaggggtggaggttgctggcgcccatcacagcgtacgcccagcagacaaggggcctcctagggtgtataatcaccagcctgctggccgggacaaaaaccaagcggagggtgaggtccagattgtgtcaactgctgcccaaactttcctggcaacgtgcatcaatggggtatgctggactgtctaccacggggccggaacgaggaccatgcatcacccaagggtcctgttattcagatgtacaccaatgtggacaaagacctcgtgggctggcccgcccctcaaggtacccgctcattgacaccctgcacctgcggctcctcggacctttacttggtcacgaggcacgccatgtcattcccgtgcgccggcgaggtgatagcagaggcagcctactttcgccccggcccatttcctacttgaaaggctcctcggggggtccactgttgtgccccgcggggcacgccgtgggcatattagggccgcggtgtgcacccgtggagtggctaaagcggtggactttatccctgtggagaacctagagacaaccatgaggtccccggtgttctcggacaactcctctccaccagcagtgccccagagcttccaggtggctcactgcatgctcccaccggcagcggtaaaagcaccaaggtcccggccgcatacgctgctcagggctacaaggtgctagtgctcaacccctctgttgccgcaacactggcctttggcgcttacatgtccaagcccatggggtcgatcctaatgtcaggaccggggtgagaacaattaccactggcagcccaatcacgtactccacctacggcaagttccttgctgacggcgggtgctcggggggtgcctatgacataataatttgtgacgaggccactccacggatgccacgtccatcttgggcatcggcactgtccttgaccaagcagagaccgcgggggcgaggctggttgtgctcgccaccgctacccctccgggctccgtcaccgtgccccatccaacatcgaggaggttgctctgtccaccaccggagaggtccccttttacggcaaggctatccccctcgaggtaatcaagggggggagacatctcatcttctgtcactcaaaaaagaagtgcgacgagctcgccgcaaagctgtcgcgttgggcatcaatgccgtggcctactaccgtggccttgacgtgtctgtcatcccgaccagcggcgatgttgtcgtcgtggcgaccgatgctctcatgaccggctatactggcgacttcgactcgtgatagactgcaacacgtgtgtcacccaaacagtcgacttcagccttgaccctaccttcaccattgagacaaccacgctcccccaggatgctgtctcccgtactcaacgccggggcaggaccggcagggggaagtcaggctctacagattcgtggcaccaggggagcgcccttccggcatgttcgactcgtccgtcctctgtgagtgctatgacgcgggctgtgcttggtatgagctcacgcccgctgagaccactgttaggctacggcgtacatgaacaccccggggcttcctgtgtgccaggaccatcttgagttttgggagggcgtttttacaggcctcacccacatagatgcccactttctatcccagacaaagcagagtggggagaaccttccttacctggtacgtaccaggccaccgtgtgcgctagggctcaagcccctcccccatcgtgggaccagatgtggaagtgtttgatccgcctcaagcccaccctccatgggccaacacctctgctatacagactgggcgcgttcagaatgaagtcaccttgacgcacccagtcaccaaatacatcatgacatgca

SEQ ID NO: 586 - DNA, 4867 bp, Hepatitis C virus; identical to SEQ ID NO: 566

SEQ ID NO: 587 - DNA, 4867 bp, Hepatitis C virus
accaaccgtcgcccacaggacgtcaagttcccgggtggcggtcagatcgttggtggagtttacttgttgccgcgcaggggccctagattgggtgtgcgcgcgacgaggaagacttccgagcggtcgcacctcgtggtagacgtcagcctatccccaaggcacgtcggcccgagggcaggacctgggctcagcccgggtacccctggcccctctatggcaatgagggctgcgggtgggcgggatggctcctgtctcccgcggctctcggcctagttggggccccacggacccccggcgtaggtcgcgcaatttgggtaaggtcatcgataccctcacatgcggcttcgccgacctcatggggtacataccgctcgtcggcgcccctcttggaggcgtgccagggccctggcgcatggcgtccgggttctggaagacggcgtgaactatgcaacagggaatcttcctggttgctctttctctatcttccttctggctctgctctcttgcctgactgtgcccgctcagcctaccaagtgcgcaactctacggggctttaccatgtcaccaatgattgccctaactcgagcattgtgtacgaggcggccgatgccatcctgcacactccggggtgtgtcccttgcgtccgcgagggtaactcctcgagtgttgggtggcggtgacccccacggtagccactaaggacggcaagctccccacaaggcagcttcgacgtcacatcgatctgcttgtcgggagcgccaccctctgctcggccctctacgtgggggactgtgcgggtccgtctttcttgtcggtcagctgttcaccttctctcccaggcgccactggacgacgcaagactgcaattgttctatctatcccggccatataacgggtcaccgcatggcgtgggatatgatgatgaactggtccctacggcggcattggtagtagctcagctgctccggatcccacaagccatcttggacatgatcgccggtgctcactggggagtcctggcgggcatggcgtatttctccatggtggggaactgggcgaggtcttggtagtgctgctgctatttgccggcgtcgacgcgcaaacccgcgtcaccgggggaagtgtcgcctacaccacggctggtattgctaggtttttccaaccaggcgccaagcagaacatccagctgatcaacaccacggcagttggcacatcaatagcacggccttgaactgcaatgcaagccttgaaaccggctggttagcaggacttttctatcacaacagattcaactcttcaggctgtcctgagaggttggccagctgcgaagccttgccgactttgaccagggctggggccccatcagccatgccaatggaagcggccccgaccaccgcccctactgctggcactaccccccaaaaccttgtggtattgtgcccgcaaagaacgtgtgtggcccggtatttgcttcacccccagccccgtggtggtgggaacgaccgacagggcgggtgcgcctacctacaactggggcgcaaatgaaacggacgtcttcgtccttaacaacaccaggccaccgcagggcaattggtcggttgtacctggatgaactcaaccgggttcaccaaagtgtgcggagcgcccccttgtgccatcggaggggtgggcaacaacaccttgcactgccccactgattgtttccgcaagcatccggaagccacgtactctcggtcggttctggtccctggatcacacccaggtgcatggtccactacccgtataggctctggcattatccctgtaccatcaactacactttatttaaagtcaggatgtacgtgggtggggtcgagcacaggtggaagctgcctgcaactggacgcggggcgaacgttgtgatctggaagacagggacaggtctgagcttagcccgttgctgctgtccaccacacagtggcaggtcctcccatgttcctttacgaccctgccagccttgtccacggcctcatccacctccaccagaacattgtggacgtgcagtatttgtacggggtggggtcaagcatcgcgtcctgggccattaaatgggagtacgtcgtcctcctgttccttctgctcgcagacgcagcgtctgctcttgcttgtggatgatgttactcatatcccaagcggaggcggctttggagaacctcgtggtactcaatgcagcatccctggccgggacgcacggtcttgtacccttcctcgtgttcttctgctttgcgtggtcctgaagggtaggtgggtgcccggagcggtctacgccctctacgggatgtggcctctcctcctgctcttgttggcgttgccccagcgagcatacgcactggacacggaggtggccgcgtcgtgtggcgcgttgttcttgtcgggttgatggcgctgactctgtcaccatattacaagcactatatcagctggtgcatgtggtggcttcagtactttctgaccagagcagaagcgcaactgcacgtgtgggttccccctctcaacgtccaggggggcgtgacgccgtcatcttactcacgtgtgttgcacacccgactttggtatttgacatcaccaaactactcctggccgttatcgggcccctttggatccttcaagccagtttgcttaaagtacctacttcgtgcgcgttcagggccttctccgaatctgcgcactagcgcggaaaatggccggaggccattacgtgcaaatggccatcatcaagttaggggcgcttactggcacctatgtctacaaccatctcactccccttcagactgggcgcacaacggcctgcgagatctggccgtggctgtggagccagtcgtcttctcccaaatggagaccaagctcatcacgtggggggcagacaccgccgcgtgcggtgacatcatcgacggctgcccgtctccgcccgtaggggccgggagatattgctcgggccggccgatggaatggtctccaaggggtggaggttgctggcgcccatcacagcgtacgcccagcagacaaggggcctcctagggtgtataatcaccagccgactggccgggacaaaaaccaagcggagggtgaggtccagattgtgtcaactgctgcccaaactttcctggcaacgtgcatcaatggggtatgctggactgtctaccacggggccggaacgaggaccttgcatcacccaagggtcctgttattcagatgtacaccaatgtggacaaagacctcgtgggctggcccgcccctcaaggtacccgctcattgacaccctgcacctgcggctcctcggacctttacttggtcacgaggcacgcgatgtcattcccgtgcgccggcgaggtgatagcagaggcagcctactttcgccccggcccatttcctacttgaaaggctcctcggggggtccactgttgtgccccgcggggcacgccgtgggcatatcagggccgcggtgtgcacccgtggagtggctaaagcggtggactttatccctgtggagaacctagagacaaccatgaggtccccggtgttctcggacaactcctctccaccagcagtgccccagagcttccaggtggctccctgcatgctcccaccggcagcggtaaaagcaccaaggtcccggccgcatacgctgctcagggctacaaggtgctagtgctcaacccctctgttgccgcaacactggcctttggcgcttacgtgtccaggcccatggggtcgatcctaatgtcaggaccggggtgagaacaattaccactggcagcccaatcacgtactccacctacggcaagttccttgctgacggcgggtgctcggggggtgcctatgacataataatttgtgacggtgccactccacggatgccacgtccatcttgggcatcggcactgtccttgaccaagcagagaccgcgggggcgaggctggttgtgctcgccaccgctacccctccgggctccgtcaccgtgccccatctaacatcgaggaggttgctctgtccaccaccggagaggtccccttttacggcaaggctatccccctcgaggtaatcaagggggggagacatctcatcttctgtcactcaaaaaagaagtgcgacgagctcgccgcaaagcggtcgcgttgggcatcaatgccgtggcctactaccgtggccttgacgtgtctgtcatcccgaccagcggcgatgttgtcgtcgtggcgaccgatgctctcatgaccggctatactggcgacttcgaccggtgatagactgcaacacgtgtgtcacccaaacagtcgacttcagccttgaccctaccttcaccattgagacaaccacgctcccccaggatgctgtctcccgtactcaacgccggggcaggaccggcagggggaagtcagcatctacagattcgtggcatcaggggagcgcccttccggcatgttcgactcgtccgtcctctgtgagtgctatgacgcgggctgtgcttggtatgagctcacgcccgctgagaccactgttaggctagagcgtacatgaacaccccggggcttcctgtgtgccaggaccatcttgagttttgggagggcgtttttacaggcctcacccacatagatgcccactttctatcccagacaaagcagagtggggagaaccttccttacctggagcgtaccaggccaccgtgtgcgctagggcccaagcccctcccccatcgtgggaccagatgtggaagtgtttgatccgcctcaagcccaccctccatgggccaacacctctgctatacagactgggcctgttcagaatgaagtcaccttgacgcacccagtcaccaaatacatcatgacatgca

SEQ ID NO: 588 - DNA, 4867 bp, Hepatitis C virus; identical to SEQ ID NO: 566

SEQ ID NO: 589 - DNA, 4867 bp, Hepatitis C virus
accaaccgtcgcccacaggacgtcaagttcccgggtggcggtcagatcgttggtggagtttacttgttgccgcgcaggggccctagattgggtgtgcgcgcgacgaggaagacttccgagcggtcgcacctcgtggtagacgtcagcctatccccaaggcacgtcggcccgagggcaggacctgggctcagcccgggtacccctggcccctctatggcaatgagggctgcgggtgggcgggatggctcctgtctcccgcggctctcggcctagttggggccccacggacccccggcgtaggtcgcgcaatttgggtaaggtcatcgataccctcacatgcggcttcgccgacctcatggggtacataccgctcgtcggcgcccctcttggaggcgtgccagggccctggcgcatggcgtccgggttctggaagacggcgtgaactatgcaacagggaatcttcctggttgctctttctctatcttccttctggctctgctctcttgcctgactgtgcccgctcagcctaccaagtgcgcaactctacggggctttaccatgtcaccaatgattgccctaactcgagcattgtgtacgaggcggccgatgccatcctgcacactccggggtgtgtcccttgcgtccgcgagggtaactcctcgagtgttgggtggcggtgacccccacggtagccactaaggacggcaagctccccacaaggcagcttcgacgtcacatcgatctgcttgtcgggagcgccaccctctgctcggccctctacgtgggggactgtgcgggtccgtctttcttgtcggtcagctgttcaccttctctcccaggcgccactggacgacgcaagactgcaattgttctatctatcccggccatataacgggtcaccgcatggcgtgggatatgatgatgaactggtccctacggcggcattggtagtagctcagctgctccggatcccacaagccatcttggacatgatcgccggtgctcactggggagtcctggcgggcatggcgtatttctccatggtggggaactgggcgaggtcttggtagtgctgctgctatttgccggcgtcgacgcgcaaacccgcgtcaccgggggaagtgtcgcctacaccacggctggtattgctaggtttttccaaccaggcgccaagcagaacatccagctgatcaacaccacggcagttggcacatcaatagcacggccttgaactgcaatgcaagccttgaaaccggctggttagcaggacttttctatcacaacagattcaactcttcaggctgtcctgagaggttggccagctgcgaagccttgccgactttgaccagggctggggccccatcagccatgccaatggaagcggccccgaccaccgcccctactgctggcactaccccccaaaaccttgtggtattgtgcccgcaaagaacgtgtgtggcccggtatttgcttcacccccagccccgtggtggtgggaacgaccgacagggcgggtgcgcctacctacaactggggcgcaaatgaaacggacgtcttcgtccttaacaacaccaggccaccgcagggcaattggtcggttgtacctggatgaactcaaccgggttcaccaaagtgtgcggagcgcccccttgtgccatcggaggggtgggcaacaacaccttgcactgccccactgattgtttccgcaagcatccggaagccacgtactctcggtcggttctggtccctggatcacacccaggtgcatggtccactacccgtataggctctggcattatccctgtaccatcaactacactttatttaaagtcaggatgtacgtgggtggggtcgagcacaggtggaagctgcctgcaactggacgcggggcgaacgttgtgatctggaagacagggacaggtctgagcttagcccgttgctgctgtccaccacacagtggcaggtcctcccatgttcctttacgaccctgccagccttgtccacggcctcatccacctccaccagaacattgtggacgtgcagtatttgtacggggtggggtcaagcatcgcgtcctgggccattaaatgggagtacgtcgtcctcctgttccttctgctcgcagacgcagcgtctgctcttgcttgtggatgatgttactcatatcccaagcggaggcggctttggagaacctcgtggtactcaatgcagcatccctggccgggacgcacggtcttgtacccttcctcgtgttcttctgctttgcgtggtcctgaagggtaggtgggtgcccggagcggtctacgccctctacgggatgtggcctctcctcctgctcttgttggcgttgccccagcgagcatacgcactggacacggaggtggccgcgtcgtgtggcgcgttgttcttgtcgggttgatggcgctgactctgtcaccatattacaagcactatatcagctggtgcatgtggtggcttcagtactttctgaccagagcagaagcgcaactgcacgtgtgggttccccctctcaacgtccaggggggcgtgacgccgtcatcttactcacgtgtgttgtacacccgactttggtatttgacatcaccaaactactcctggccgttatcgggcccctttggatccttcaagccagtttgcttaaagtacctacttcgtgcgcgttcagggccttctccgaatctgcgcactagcgcggaaaatggccggaggccattacgtgcaaatggccatcatcaagttaggggcgcttactggcacctatgtctacaaccatctcactccccttcagactgggcgcacaacggcctgcgagatctggccgtggctgtggagccagtcgtcttctcccaaatggagaccaagctcatcacgtggggggcagacaccgccgcgtgcggtgacatcatcgacggctgcccgtctccgcccgtaggggccgggagatattgctcgggccggccgatggaatggtctccaaggggtggaggttgctggcgcccatcacagcgtacgcccagcagacaaggggcctcctagggtgtataatcaccagccgactggccgggacaaaaaccaagcggagggtgaggtccagattgtgtcaactgctgcccaaactttcctggcaacgtgcatcaatggggtatgctggactgtctaccacggggccggaacgaggaccttgcatcacccaagggtcctgttattcagatgtacaccaatgtggacaaagacctcgtgggctggcccgcccctcaaggtacccgctcattgacaccctgcacctgcggctcctcggacctttacttggtcacgaggcacgcgatgtcattcccgtgcgccggcgaggtgatagcagaggcagcctactttcgccccggcccatttcctacttgaaaggctcctcggggggtccactgttgtgccccgcggggcacgccgtgggcatatcagggccgcggtgtgcacccgtggagtggctaaagcggtggactttatccctgtggagaacctagagacaaccatgaggtccccggtgttctcggacaactcctctccaccagcagtgccccagagcttccaggtggctccctgcatgctcccaccggcagcggtaaaagcaccaaggtcccggccgcatacgctgctcagggctacaaggtgctagtgctcaacccctctgttgccgcaacactggcctttggcgcttacatgtccaggcccatggggtcgatcctaatgtcaggaccggggtgagaacaattaccactggcagcccaatcacgtactccacctacggcaagttccttgctgacggcgggtgctcggggggtgcctatgacataataatttgtgacggtgccactccacggatgccacgtccatcttgggcatcggcactgtccttgaccaagcagagaccgcgggggcgaggctggttgtgctcgccaccgctacccctccgggctccgtcaccgtgccccatctaacatcgaggaggttgctctgtccaccaccggagaggtccccttttacggcaaggctatccccctcgaggtaatcaagggggggagacatctcatcttctgtcactcaaaaaagaagtgcgacgagctcgccgcaaagcggtcgcgttgggcatcaatgccgtggcctactaccgtggccttgacgtgtctgtcatcccgaccagcggcgatgttgtcgtcgtggcgaccgatgctctcatgaccggctatactggcgacttcgaccggtgatagactgcaacacgtgtgtcacccaaacagtcgacttcagccttgaccctaccttcaccattgagacaaccacgctcccccaggatgctgtctcccgtactcaacgccggggcaggaccggcagggggaagtcagcatctacagattcgtggcaccaggggagcgcccttccggcatgttcgactcgtccgtcctctgtgagtgctatgacgcgggctgcgcttggtatgagctcacgcccgctgagaccactgttaggctagagcgtacatgaacaccccggggcttcctgtgtgccaggaccatcttgagttttgggagggcgtttttacaggcctcacccacatagatgcccactttctatcccagacaaagcagagtggggagaaccttccttacctggagcgtaccaggccaccgtgtgcgctagggctcaagcccctcccccatcgtgggaccagatgtggaagtgtttgatccgcctcaagcccaccctccatgggccaacacctctgctatacagactgggcctgttcagaatgaagtcaccttgacgcacccaatcaccaaatacatcatgacatgca

SEQ ID NO: 590 - DNA, 4867 bp, Hepatitis C virus; identical to SEQ ID NO: 566

SEQ ID NO: 591 - DNA, 4867 bp, Hepatitis C virus
accaaccgtcgcccacaggacgtcaagttcccgggtggcggtcagatcgttggtggagtttacttgttgccgcgcaggggccctagattgggtgtgcgcgcgacgaggaagacttccgagcggtcgcacctcgtggtagacgtcagcctatccccaaggcacgtcggcccgagggcagggcctgggctcagcccgggtacccctggcccctctatggcaatgagggctgcgggtgggcgggatggctcctgtctcccgcggctcccggcctagttggggccccacggacccccggcgtaggtcgcgcaatttgggtaaggtcatcgataccctcacatgcggcttcgccgacctcatggggtacataccgctcgtcggcgcccctcttggaggcgtgccagggccctggcgcatggcgtccgggttctggaagacggcgtgaactatgcaacagggaatcttcctggttgctctttctctatcttccttctggctctgctctcttgcctgactgtgcccgctcagcctaccaagtgcgcaactctacggggctttaccatgtcaccaatgattgccctaactcgagcattgtgtacgaggcggccgatgccatcctgcacactccggggtgtgtcccttgcgtccgcgagggtaactcctcgagtgttgggtggcggtgacccccacggtggccactagggacggcaagctccccacaacgcagcttcgacgtcacatcgatctgcttgtcgggagcgccaccctctgctcggccctctacgtgggggactgtgcgggtccgtctttcttgtcggtcagctgttcaccttctctcccaggcagcactggacgacgcaagactgcaattgttctatctatcccggccatataacgggtcaccgcatggcgtgggatatgatgatgaactggtccctacggcggcattggtagtagctcagctgctccggatcccacaagccatcttggacatgatcgccggtgctcactggggagtcctggcgggcatggcgtatttctccatggtggggaactgggcgaggtcttggtagtgctgctgctatttgccggcgtcgacgcgtacacccgcgtcactgggggaagtgccgcctacaccacgtctggtcttgctaggctgttctaaccaggcgcccagcagaacatccagctgatcaacaccacggcagttggcacatcaatagcacggccttgaactgcaacgcaagccttgacaccggctggttagcaggacttttctattacagcaaattcaactcttcaggctgtcctgagaggttggccagctgcgaagccttgccgactttgaccagggctggggccccatcagccatgccaatggaagcggccccgaccaccgcccctactgctggcactaccccccaaaaccttgtggtattgtgcgcgcaaagagcgtgtgtggcccggtatttgcttcacccccagccccgtggtggtgggaacgaccgacagggcgggtgcgcctacctacaactggggcgcaaatgaaacggacgtcttcgtccttaacaacaccaggccaccgcggggcaattggtcggttgtacctggatgaactcaaccggattcaccaaagtgtgcggagcgcccccttgtgccatcggaggggtgggcaacaacaccttgcactgccccactgattgtttccgcaagcatccggaagccacgtactctcggtcggttccggtccctggatcacacccaggtgcatggtccactacccgtataggctctggcattatccctgtaccatcaactacactttatttaaagtcaggatgtacgtgggtggggtcgagcacaggtggaagctgcctgcaactggacgcggggcgaacgttgtgatctggaagacagggacaggtccgagcttagcccgttgctgctgtccaccacacagtggcaggtcctcccatgttcctttacgaccctgccagccttgtccacggcctcatccacctccaccagaacattgtggacgtgcagtatttgtacggggtggggtcaagcatcgcgtcctgggccattaaatgggagtacgtcgtcctcctgttccttctgctcgcagacgcagcgtctgctcttgcttgtggatgatgttactcatatcccaagcggaggcggccttggagaacctcgtggtactcaatgcagcatccctggccgggacgcacggtcttgtacccttcctcgtgttcttctgctttgcgtggtcctgaagggtaggtgggtgcccggagcggtctacgccctctacgggatgtggcctctcctcctgctcctgttggcgttgccccagcgggcatacgcactggacacggaggtggccgcgtcgtgtggcgcgttgttcttgtcgggttgatggcgctgactctgtcaccatattacaagcactatatcagctggtgcatgtggtggcttcagtactttctgaccagagcagaagcgcaactgcacgtgtgggttccccctctcaacgttcaggggggcgtgacgccgttatcttactcacgtgtgttgtacacccgactttggtatttgacatcaccaaactactcctggccgttatcgggcccctttggatccttcaagccagtttgcttaaagtacctacttcgtgcgcgttcagggccttctccggatctgcgcactagcgcggaaaatggccggaggccattacgtgcaaatggccatcatcaagttaggggcgcttactggcacctatgtctacaaccatctcactccccttcagactgggcgcacaacggcctgcgagatctggccgtggctgtggagccagtcgtcttctcccaaatggagaccaagctcatcacgtggggggcagacaccgccgcgtgcggtgacatcatcgacggctgcccgtctccgcccgtaggggccgggagatattgctcgggccggccgatggaatggtctccaaggggtggaggttgctggcgcccatcacagcgtacgcccagcagacaaggggcctcctagggtgtataatcaccagccgactggccgggacaaaaaccaagcggagggtgaggtccagattgtgtcaactgctgcccaaactttcctggcaacgtgcatcaatggggtatgctggactgtctaccacggggccggaacgaggaccttgcatcacccaagggtcctgttattcagatgtacaccaatgtggacaaagacctcgtgggctggcccgcccctcaaggtacccgctcattgacaccctgcacctgcggctcctcggacctttacctggtcacgaggcacgcgatgtcattcccgtgcgccggcgaggtgatagcagaggcagcctgctttcgccccggcccatttcctacttgaaaggctcctcggggggtccgctgttgtgccccgcggggcacgccgtgggcatttcagggccgcggtgtgcacccgtggagtggctaaagcggtggactttatccctgtggagaacctagagacaaccatgagatccccggtgttctcggacaactcctctccaccagcagtgccccagagcttccaggtggctccctgcatgctcccaccggcagcggtaaaagcaccaaggtcccggccgcatacgctgctcagggctacaaggtgctagtgctcaacccctctgttgccgcaacactggcctttggcgcttacatgtccaggcccatggggtcgatcctaatgtcaggaccggggtgagaacaattaccactggcagcccaatcacgtactccacctacggcaagttccttgctgacggcgggtgctcggggggtgcctatgacataataatttgtgacggtgccactccacggatgccacgtctatcttgggcatcggtactgcccttgaccaagcagagaccgcgggggcgaggctggttgtgctcgccaccgctacccctccgggctccgtcaccgtgccccatctaacatcgaggaggttgctctgtccaccaccggagaggtccccttttacggcaaggctatccccctcgaggtaatcaagggggggagacatctcatcttctgtcactcaaaaaagaagtgcgacgagctcgccgcaaagcggtcgcgttgggcatcaatgccgtggcctactaccgtggccttgacgtgtccgtcatcccgaccagcggcgatgttgtcgtcgtggcgaccgatgctctcatgaccggctatactggcgacttcgaccggtgatagactgcaacacgtgtgtcacccaaacagtcgacttcagccttgaccctaccttcaccattgagacaaccacgctcccccaggatgctgtctcccgtactcaacgccggggcaggaccggcagggggaagtcagcatctacagattcgtggcaccgggggagcgcccttccggcatgttcgactcgtccgtcctctgtgagtgctatgacgcgggctgtgcttggtatgagctcacgcccgctgagaccactgttaggctagagcgtacatgaacaccccggggcttcctgtgtgccaggaccatcttgagttttgggagggcgtctttacaggcctcacccacatagatgcccactttctatcccagacaaagcagagtggggagaaccttccttacctggagcgtaccaggccaccgtgtgcgctagggctcaagcccctcccccatcgtgggaccagatgtggaagtgtttgatccgcctcaagcccaccctccatgggccaacacctctgctatacagactgggcctgttcagaatgaagtcaccttgacgcacccagtcaccaaatacatcatgacatgca

SEQ ID NO: 592 - DNA, 4867 bp, Hepatitis C virus
accaaccgtcgcccacaggacgtcaagttcccgggtggcggtcagatcgttggtggagtttacttgttgccgcgcaggggccctagattgggtgtgcgcgcgacgaggaagacttccgagcggtcgcacctcgtggtagacgtcagcctatccccaaggcacgtcggcccgagggcaggacctgggctcagcccgggtacccctggcccctctatggcaatgagggctgcgggtgggcgggatggctcctgtctcccgcggctctcggcctagttggggccccacggacccccggcgtaggtcgcgcaatttgggtaaggtcatcgataccctcacatgcggcttcgccgacctcatggggtacataccgctcgtcggcgcccctcttggaggcgtgccagggccctggcgcatggcgtccgggttctggaagacggcgtgaactatgcaacagggaatcttcctggttgctctttctctatcttccttctggctctgctctcttgcctgactgtgcccgctcagcctaccaagtgcgcaactctacggggctttaccatgtcaccaatgattgccctaactcgagcattgtgtacgaggcggccgatgccatcctgcacactccggggtgtgtcccttgcgtccgcgagggtaactcctcgagtgttgggtggcggtgacccccacggtagccactaaggacggcaagctccccacaaggcagcttcgacgtcacatcgatctgcttgtcgggagcgccaccctctgctcggccctctacgtgggggactgtgcgggtccgtctttcttgtcggtcagctgttcaccttctctcccaggcgccactggacgacgcaagactgcaattgttctatctatcccggccatataacgggtcaccgcatggcgtgggatatgatgatgaactggtccctacggcggcattggtagtagctcagctgctccggatcccacaagccatcttggacatgatcgccggtgctcactggggagtcctggcgggcatggcgtatttctccatggtggggaactgggcgaggtcttggtagtgctgctgctatttgccggcgtcgacgcgcaaacccgcgtcaccgggggaagtgtcgcctacaccacggctggtattgctaggtttttccaaccaggcgccaagcagaacatccagctgatcaacaccacggcagttggcacatcaatagcacggccttgaactgcaatgcaagccttgaaaccggctggttagcaggacttttctatcacaacagattcaactcttcaggctgtcctgagaggttggccagctgcgaagccttgccgactttgaccagggctggggccccatcagccatgccaatggaagcggccccgaccaccgcccctactgctggcactaccccccaaaaccttgtggtattgtgcccgcaaagaacgtgtgtggcccggtatttgcttcacccccagccccgtggtggtgggaacgaccgacagggcgggtgcgcctacctacaactggggcgcaaatgaaacggacgtcttcgtccttaacaacaccaggccaccgcagggcaattggtcggttgtacctggatgaactcaaccgggttcaccaaagtgtgcggagcgcccccttgtgccatcggaggggtgggcaacaacaccttgcactgccccactgattgtttccgcaagcatccggaagccacgtactctcggtcggttctggtccctggatcacacccaggtgcatggtccactacccgtataggctctggcattatccctgtaccatcaactacactttatttaaagtcaggatgtacgtgggtggggtcgagcacaggtggaagctgcctgcaactggacgcggggcgaacgttgtgatctggaagacagggacaggtctgagcttagcccgttgctgctgtccaccacacagtggcaggtcctcccatgttcctttacgaccctgccagccttgtccacggcctcatccacctccaccagaacattgtggacgtgcagtatttgtacggggtggggtcaagcatcgcgtcctgggccattaaatgggagtacgtcgtcctcctgttccttctgctcgcagacgcagcgtctgctcttgcttgtggatgatgttactcatatcccaagcggaggcggctttggagaacctcgtggtactcaatgcagcatccctggccgggacgcacggtcttgtacccttcctcgtgttcttctgctttgcgtggtcctgaagggtaggtgggtgcccggagcggtctacgccctctacgggatgtggcctctcctcctgctcttgttggcgttgccccagcgagcatacgcactggacacggaggtggccgcgtcgtgtggcgcgttgttcttgtcgggttgatggcgctgactctgtcaccatattacaagcactatatcagctggtgcatgtggtggcttcagtactttctgaccagagcagaagcgcaactgcacgtgtgggttccccctctcaacgtccaggggggcgtgacgccgtcatcttactcacgtgtgttgtacacccgactttggtatttgacatcaccaaactactcctggccgttatcgggcccctttggatccttcaagccagtttgcttaaagtacctacttcgtgcgcgttcagggccttctccgaatctgcgcactagcgcggaaaatggccggaggccattacgtgcaaatggccatcatcaagttaggggcgcttactggcacctatgtctacaaccatctcactccccttcagactgggcgcacaacggcctgcgagatctggccgtggctgtggagccagtcgtcttctcccaaatggagaccaagctcatcacgtggggggcagacaccgccgcgtgcggtgacatcatcgacggctgcccgtctccgcccgtaggggccgggagatattgctcgggccggccgatggaatggtctccaaggggtggaggttgctggcgcccatcacagcgtacgcccagcagacaaggggcctcctagggtgtataatcaccagccgactggccgggacaaaaaccaagcggagggtgaggtccagattgtgtcaactgctgcccaaactttcctggcaacgtgcatcaatggggtatgctggactgtctaccacggggccggaacgaggaccttgcatcacccaagggtcctgttattcagatgtacaccaatgtggacaaagacctcgtgggctggcccgcccctcaaggtacccgctcattgacaccctgcacctgcggctcctcggacctttacttggtcacgaggcacgcgatgtcattcccgtgcgccggcgaggtgatagcagaggcagcctactttcgccccggcccatttcctacttgaaaggctcctcggggggtccactgttgtgccccgcggggcacgccgtgggcatatcagggccgcggtgtgcacccgtggagtggctaaagcggtggactttatccctgtggagaacctagagacaaccatgaggtccccggtgttctcggacaactcctctccaccagcagtgccccagagcttccaggtggctccctgcatgctcccaccggcagcggtaaaagcaccaaggtcccggccgcatacgctgctcagggctacaaggtgctagtgctcaacccctctgttgccgcaacactggcctttggcgcttacatgtccaggcccatggggtcgatcctaatgtcaggaccggggtgagaacaattaccactggcagcccaatcacgtactccacctacggcaagttccttgctgacggcgggtgctcggggggtgcctatgacataataatttgtgacggtgccactccacggatgccacgtccatcttgggcatcggcactgtccttgaccaagcagagaccgcgggggcgaggctggttgtgctcgccaccgctacccctccaggctccgtcaccgtgccccatctaacatcgaggaggttgctctgtccaccaccggagaggtccccttttacggcaaggctatccccctcgaggtaatcaagggggggagacatctcatcttctgtcactcaaaaaagaagtgcgacgagctcgccgcaaagcggtcgcgttgggcatcaatgccgtggcctactaccgtggccttgacgtgtctgtcatcccgaccagcggcgatgttgtcgtcgtggcgaccgatgctctcatgaccggctatactggcgacttcgaccggtgatagactgcaacacgtgtgtcacccaaacagtcgacttcagccttgaccctaccttcaccattgagacaaccacgctcccccaggatgctgtctcccgtactcaacgccggggcaggaccggcagggggaagtcagcatctacagattcgtggcaccaggggagcgcccttccggcatgttcgactcgtccgtcctctgtgagtgctatgacgcgggctgtgcttggtatgagctcacgcccgctgagaccactgttaggctagagcgtacatgaacaccccggggcttcctgtgtgccaggaccatcttgagttttgggagggcgtttttacaggcctcacccacatagatgcccactttctatcccagacaaagcagagtggggagaaccttccttacctggagcgtaccaggccaccgtgtgcgctagggctcaagcccctcccccatcgtgggaccagatgtggaagtgtttgatccgcctcaagcccaccctccatgggccaacacctctgctatacagactgggcctgttcagaatgaagtcaccttgacgcacccagtcaccaaatacatcatgacatgca

SEQ ID NO: 593 - DNA, 4867 bp, Hepatitis C virus
accaaccgtcgcccacaggacgtcaagttcccgggtggcggtcagatcgttggtggagtttacttgttgccgcgcaggggccctagattgggtgtgcgcgcgacgaggaagacttccgagcggtcgcacctcgtggtagacgtcagcctatccccaaggcacgtcggcccgagggcaggacctgggctcagcccgggtacccctggcccctctatggcaatgagggctgcgggtgggcgggatggctcctgtctcccgcggctctcggcctagttggggccccacggacccccggcgtaggtcgcgcaatttgggtaaggtcatcgataccctcacatgcggcttcgccgacctcatggggtacataccgctcgtcggcgcccctcttggaggcgtgccagggccctggcgcatggcgtccgggttctggaagacggcgtgaactatgcaacagggaatcttcctggttgctctttctctatcttccttctggctctgctctcttgcctgactgtgcccgctcagcctaccaagtgcgcaactctacggggctttaccatgtcaccaatgattgccctaactcgagcattgtgtacgaggcggccgatgccatcctgcacactccggggtgtgtcccttgcgtccgcgagggtaactcctcgagtgttgggtggcggtgacccccacggtagccactaaggacggcaagctccccacaaggcagcttcgacgtcacatcgatctgcttgtcgggagcgccaccctctgctcggccctctacgtgggggactgtgcgggtccgtctttcttgtcggtcagctgttcaccttctctcccaggcgccactggacgacgcaagactgcaattgttctatctatcccggccatataacgggtcaccgcatggcgtgggatatgatgatgaactggtccctacggcggcattggtagtagctcagctgctccggatcccacaagccatcttggacatgatcgccggtgctcactggggagtcctggcgggcatggcgtatttcttcatggtggggaactgggcgaggtcttggtagtgctgctgctatttgccggcgtcgacgcgcaaacccgcgtcaccgggggaagtgtcgcctacaccacggctggtattgctaggtttttccaaccaggcgccaagcagaacatccagctgatcaacaccacggcagttggcacatcaatagcacggccttgaactgcaatgcaagccttgaaaccggctggttagcaggacttttctatcacaacagattcaactcttcaggctgtcctgagaggttggccagctgcgaagccttgccgactttgaccagggctggggccccatcagccatgccaatggaagcggccccgaccaccgcccctactgctggcactaccccccaaaaccttgtggtattgtgcccgcaaagaacgtgtgtggcccggtatttgcttcacccccagccccgtggtggtgggaacgaccgacagggcgggtgcgcctacctacaactggggcgcaaatgaaacggacgtcttcgtccttaacaacaccaggccaccgcagggcaattggtcggttgtacctggatgaactcaaccgggttcaccaaagtgtgcggagcgcccccttgtgccatcggaggggtgggcaacaacaccttgcactgccccactgattgtttccgcaagcatccggaagccacgtactctcggtcggttctggtccctggatcacacccaggtgcatggtccactacccgtataggctctggcattatccctgtaccatcaactacactttatttaaagtcaggatgtacgtgggtggggtcgagcacaggtggaagctgcctgcaactggacgcggggcgaacgttgtgatctggaagacagggacaggtctgagcttagcccgttgctgctgtccaccacacagtggcaggtcctcccatgttcctttacgaccttgccagccttgtccacggcctcatccacctccaccagaacattgtggacgtgcagtatttgtacggggtggggtcaagcatcgcgtcctgggccattaaatgggagtacgtcgtcctcctgttccttctgctcgcagacgcagcgtctgctcttgcttgtggatgatgttactcatatcccaagcggaggcggctttggagaacctcgtggtactcaatgcagcatccctggccgggacgcacggtcttgtacccttcctcgtgttcttctgctttgcgtggtcctgaagggtaggtgggtgcccggagcggtctacgccctctacgggatgtggcctctcctcctgctcttgttggcgttgccccagcgagcatacgcactggacacggaggtggccgcgtcgtgtggcgcgttgttcttgtcgggttgatggcgctgactctgtcaccatattacaagcactatatcagctggtgcatgtggtggcttcagtactttctgaccagagcagaagcgcaactgcacgtgtgggttccccctctcaacgtccaggggggcgtgacgccgtcatcttactcacgtgtgttgtacacccgactttggtatttgacatcaccaaactactcctggccgttatcgggcccctttggatccttcaagccagtttgcttaaagtacctacttcgtgcgcgttcagggccttctccgaatctgcgcactagcgcggaaaatggccggaggccattacgtgcaaatggccatcatcaagttaggggcgcttactggcacctatgtctacaaccatctcactccccttcagactgggcgcacaacggcctgcgagatctggccgtggctgtggagccagtcgtcttctcccaaatggagaccaagctcatcacgtggggggcagacaccgccgcgtgcggtgacatcatcgacggctgcccgtctccgcccgtaggggccgggagatattgctcgggccggccgatggaatggtctccaaggggtggaggttgctggcgcccatcacagcgtacgcccagcagacaaggggcctcctagggtgtataatcaccagccgactggccgggacaaaaaccaagcggagggtgaggtccagattgtgtcaactgctgcccaaactttcctggcaacgtgcatcaatggggtatgctggactgtctaccacggggccggaacgaggaccttgcatcacccaagggtcctgttattcagatgtacaccaatgtggacaaagacctcgtgggctggcccgcccctcaaggtacccgctcattgacaccctgcacctgcggctcctcggacctttacttggtcacgaggcacgcgatgtcattcccgtgcgccggcgaggtgatagcagaggcagcctactttcgccccggcccatttcctacttgaaaggctcctcggggggtccactgttgtgccccgcggggcacgccgtgggcatatcagggccgcggtgtgcacccgtggagtggctaaagcggtggactttatccctgtggagaacctagagacaaccatgaggtccccggtgttctcggacaactcctctccaccagcagtgccccagagcttccaggtggctccctgcatgctcccaccggcagcggtaaaagcaccaaggtcccggccgcatacgctgctcagggctacaaggtgctagtgctcaacccctctgttgccgcaacactggcctttggcgcttacatgtccaggcccatggggtcgatcctaatgtcaggaccggggtgagaacaattaccactggcagcccaatcacgtactccacctacggcaagttccttgctgacggcgggtgctcggggggtgcctatgacataataatttgtgacggtgccactccacggatgccacgtccatcttgggcatcggcactgtccttgaccaagcagagaccgcgggggcgaggctggttgtgctcgccaccgctacccctccgggctccgtcaccgtgccccatctaacatcgaggaggttgctctgtccaccaccggagaggtccccttttacggcaaggctatccccctcgaggtaatcaagggggggagacatctcatcttctgtcactcaaaaaagaagtgcgacgagctcgccgcaaagcggtcgcgttgggcatcaatgccgtggcctactaccgtggccttgacgtgtctgtcatcccgaccagcggcgatgttgtcgtcgtggcgaccgatgctctcatgaccggctatactggcgacttcgaccggtgatagactgcaacacgtgtgtcacccaaacagtcgacttcagccttgaccctaccttcaccattgagacaaccacgctcccccaggatgctgtctcccgtactcaacgccggggcaggaccggcagggggaagtcagcatctacagattcgtggcaccaggggagcgcccttccggcatgttcgactcgtccgtcctctgtgagtgctatgacgcgggctgtgcttggtatgagctcacgcccgctgagaccactgttaggctagagcgtacatgaacaccccggggcttcctgtgtgccaggaccatcttgagttttgggagggcgtttttacaggcctcacccacatagatgcccactttctatcccagacaaagcagagtggggagaaccttccttacctggagcgtaccaggccaccgtgtgcgctagggctcaagcccctcccccatcgtgggaccagatgtggaagtgtttgatccgcctcaagcccaccctccatgggccaacacctctgctatacagactgggcctgttcagaatgaagtcaccttgacgcacccagtcaccaaatacatcatgacatgca

SEQ ID NO: 594 - DNA, 4867 bp, Hepatitis C virus
accaaccgtcgcccacaggacgtcaagttcccgggtggcggtcagatcgttggtggagtttacttgttgccgcgcaggggccctagattgggtgtgcgcgcgacgaggaagacttccgagcggtcgcacctcgtggtagacgtcagcctatccccaaggcacgtcggcccgagggcaggacctgggctcagcccgggtacccctggcccctctatggcaatgagggctgcgggtgggcgggatggctcctgtctcccgcggctctcggcctagttggggccccacggacccccggcgtaggtcgcgcaatttgggtaaggtcatcgataccctcacatgcggcttcgccgacctcatggggtacataccgctcgtcggcgcccctcttggaggcgtgccagggccctggcgcatggcgtccgggttctggaagacggcgtgaactatgcaacagggaatcttcctggttgctctttctctatcttccttctggctctgctctcttgcctgactgtgcccgctcagcctaccaagtgcgcaactctacggggctttaccatgtcaccaatgattgccctaactcgagcattgtgtacgaggcggccgatgccatcctgcacactccggggtgtgtcccttgcgtccgcgagggtaactcctcgagtgttgggtggcggtgacccccacggtagccactaaggacggcaagctccccacaaggcagcttcgacgtcacatcgatctgcttgtcgggagcgccaccctctgctcggccctctacgtgggggactgtgcgggtccgtctttcttgtcggtcagctgttcaccttctctcccaggcgccactggacgacgcaagactgcaattgttctatctatcccggccatataacgggtcaccgcatggcgtgggatatgatgatgaactggtccctacggcggcattggtagtagctcagctgctccggatcccacaagccatcttggacatgatcgccggtgctcactggggagtcctggcgggcatggcgtatttctccatggtggggaactgggcgaggtcttggtagtgctgctgctatttgccggcgtcgacgcgcaaacccgcgtcaccgggggaagtgtcgcctacaccacggctggtattgctaggtttttccaaccaggcgccaagcagaacatccagctgatcaacaccacggcagttggcacatcaatagcacggccttgaactgcaatgcaagccttgaaaccggctggttagcaggacttttctatcacaacagattcaactcttcaggctgtcctgagaggttggccagctgcgaagccttgccgactttgaccagggctggggccccatcagccatgccaatggaagcggccccgaccaccgcccctactgctggcactaccccccaaaaccttgtggtattgtgcccgcaaagaacgtgtgtggcccggtatttgcttcacccccagccccgtggtggtgggaacgaccgacagggcgggtgcgcctacctacaactggggcgcaaatgaaacggacgtcttcgtccttaacaacaccaggccaccgcagggcaattggtcggttgtacctggatgaactcaaccgggttcaccaaagtgtgcggagcgcccccttgtgccatcggaggggtgggcaacaacaccttgcactgccccactgattgtttccgcaagcatccggaagccacgtactctcggtcggttctggtccctggatcacacccaggtgcatggtccactacccgtataggctctggcattatccctgtaccatcaactacactttatttaaagtcaggatgtacgtgggtggggtcgagcacaggtggaagctgcctgcaactggacgcggggcgaacgttgtgatctggaagacagggacaggtctgagcttagcccgttgctgctgtccaccacacagtggcaggtcctcccatgttcctttacgaccctgccagccttgtccacggcctcatccacctccaccagaacattgtggacgtgcagtatttgtacggggtggggtcaagcatcgcgtcctgggccattaaatgggagtacgtcgtcctcctgttccttctgctcgcagacgcagcgtctgctcttgcttgtggatgatgttactcatatcccaagcggaggcggctttggagaacctcgtggtactcaatgcagcatccctggccgggacgcacggtcttgtacccttcctcgtgttcttctgctttgcgtggtcctgaagggtaggtgggtgcccggagcggtctacgccctctacgggatgtggcctctcctcctgctcttgttggcgttgccccagcgagcatacgcactggacacggaggtggccgcgtcgtgtggcgcgttgttcttgtcgggttgatggcgctgactctgtcaccatattacaagcactatatcagctggtgcatgtggtggcttcagtaccttctgaccagagcagaagcgcaactgcacgtgtgggttccccctctcaacgtccaggggggcgtgacgccgtcatcttactcacgtgtgttgtacacccgactttggtatttgacatcaccaaactactcctggccgttatcgggcccctttggatccttcaagccagtttgcttaaagtacctacttcgtgcgcgttcagggccttctccgaatctgcgcactagcgcggaaaatggccggaggccattacgtgcaaatggccatcatcaagttaggggcgcttactggcacctatgtctacaaccatctcactccccttcagactgggcgcacaacggcctgcgagatctggccgtggctgtggagccagtcgtcttctcccaaatggagaccaagctcatcacgtggggggcagacaccgccgcgtgcggtgacatcatcgacggctgcccgtctccgcccgtaggggccgggagatattgctcgggccggccgatggaatggtctccaaggggtggaggttgctggcgcccatcacagcgtacgcccagcagacaaggggcctcctagggtgtataatcaccagccgactggccgggacaaaaaccaagcggagggtgaggtccagattgtgtcaactgctgcccaaactttcctggcaacgtgcatcaatggggtatgctggactgtctaccacggggccggaacgaggaccttgcatcacccaagggtcctgttattcagatgtacaccaatgtggacaaagacctcgtgggctggcccgcccctcaaggtacccgctcattgacaccctgcacctgcggctcctcggacctttacttggtcacgaggcacgcgatgtcattcccgtgcgccggcgaggtgatagcagaggcagcctactttcgccccggcccatttcctacttgaaaggctcctcggggggtccactgttgtgccccgcggggcacgccgtgggcatatcagggccgcggtgtgcacccgtggagtggctaaagcggtggactttatccctgtggagaacctagagacaaccatgaggtccccggtgttctcggacaactcctctccaccagcagtgccccagagcttccaggtggctccctgcatgctcccaccggcagcggtaaaagcaccaaggtcccggccgcatacgctgctcagggctacaaggtgctagtgctcaacccctctgttgccgcaacactggcctttggcgcttacatgtccaggcccatggggtcgatcctaatgtcaggaccggggtgagaacaattaccactggcagcccaatcacgtactccacctacggcaagttccttgctgacggcgggtgctcggggggtgcctatgacataataatttgtgacggtgccactccacggatgccacgtccatcttgggcatcggcactgtccttgaccaagcagagaccgcgggggcgaggctggttgtgctcgccaccgctacccctccgggctccgtcaccgtgccccatctaacatcgaggaggttgctctgtccaccaccggagaggtccccttttacggcaaggctatccccctcgaggtaatcaagggggggagacatctcatcttctgtcactcaaaaaagaagtgcgacgagctcgccgcaaagcggtcgcgttgggcatcaatgccgtggcctactaccgtggccttgacgtgtctgtcatcccgaccagcggcgatgttgtcgtcgtggcgaccgatgctctcatgaccggctatactggcgacttcgaccggtgatagactgcaacacgtgtgtcacccaaacagtcgacttcagccttgaccctaccttcaccattgagacaaccacgctcccccaggatgctgtctcccgtactcaacgccggggcaggaccggcagggggaagtcagcatctacagattcgtggcaccaggggagcgcccttccggcatgttcgactcgtccgtcctctgtgagtgctatgacgcgggctgtgcttggtatgagctcacgcccgctgagaccactgttaggctagagcgtacatgaacaccccggggcttcctgtgtgccaggaccatcttgagttttgggagggcgtttttacaggcctcacccacatagatgcccactttctatcccagacaaagcagagtggggagaaccttccttacctggagcgtaccaggccaccgtgtgcgctagggctcaagcccctcccccatcgtgggaccagatgtggaagtgtttgatccgcctcaagcccaccctccatgggccaacacctctgctatacagactgggcctgttcagaatgaagtcaccttgacgcacccagtcaccaaatacatcatgacatgca

SEQ ID NO: 595 - DNA, 4867 bp, Hepatitis C virus; identical to SEQ ID NO: 566

SEQ ID NO: 596 - DNA, 4867 bp, Hepatitis C virus
accaaccgtcgcccacaggacgtcaagttcccgggtggcggtcagatcgttggtggagtttacttgttgccgcgcaggggccctagattgggtgtgcgcgcgacgaggaagacttccgagcggtcgcacctcgtggtagacgtcagcctatccccaaggcacgtcggcccgagggcaggacctgggctcagcccgggtacccctggcccctctatggcaatgagggctgcgggtgggcgggatggctcctgtctcccgcggctctcggcctagttggggccccacggacccccggcgtaggtcgcgcaatttgggtaaggtcatcgataccctcacatgcggcttcgccgacctcatggggtacataccgctcgtcggcgcccctcttggaggcgtgccagggccctggcgcatggcgtccgggttctggaagacggcgtgaactatgcaacagggaatcttcctggttgctctttctctatcttccttctggctctgctctcttgcctgactgtgcccgctcagcctaccaagtgcgcaactctacggggctttaccatgtcaccaatgattgccctaactcgagcattgtgtacgaggcggccgatgccatcctgcacactccggggtgtgtcccttgcgtccgcgagggtaactcctcgagtgttgggtggcggtgacccccacggtagccactaaggacggcaagctccccacaaggcagcttcgacgtcacatcgatctgcttgtcgggagcgccaccctctgctcggccctctacgtgggggactgtgcgggtccgtctttcttgtcggtcagctgttcaccttctctcccaggcgccactggacgacgcaagactgcaattgttctatctatcccggccatataacgggtcaccgcatggcgtgggatatgatgatgaactggtccctacggcggcattggtagtagctcagctgctccggatcccacaagccatcttggacatgatcgccggtgctcactggggagtcctggcgggcatggcgtatttctccatggtggggaactgggcgaggtcttggtagtgctgctgctatttgccggcgtcgacgcgcaaacccgcgtcaccgggggaagtgtcgcctacaccacggctggtattgctaggtttttccaaccaggcgccaagcagaacatccagctgatcaacaccacggcagttggcacatcaatagcacggccttgaactgcaatgcaagccttgaaaccggctggttagcaggacttttctatcacaacagattcaactcttcaggctgtcctgagaggttggccagctgcgaagccttgccgactttgaccagggctggggccccatcagccatgccaatggaagcggccccgaccaccgcccctactgctggcactaccccccaaaaccttgtggtattgtgcccgcaaagaacgtgtgtggcccggtatttgcttcacccccagccccgtggtggtgggaacgaccgacagggcgggtgcgcctacctacaactggggcgcaaatgaaacggacgtcttcgtccttaacaacaccaggccaccgcagggcaattggtcggttgtacctggatgaactcaaccgggttcaccaaagtgtgcggagcgcccccttgtgccatcggaggggtgggcaacaacaccttgcactgccccactgattgtttccgcaagcatccggaagccacgtactctcggtcggttctggtccctggatcacacccaggtgcatggtccactacccgtataggctctggcattatccctgtaccatcaactacactttatttaaagtcaggatgtacgtgggtggggtcgagcacaggtggaagctgcctgcaactggacgcggggcgaacgttgtgatctggaagacagggacaggtctgagcttagcccgttgctgctgtccaccacacagtggcaggtcctcccatgttcctttacgaccctgccagccttgtccacggcctcatccacctccaccagaacattgtggacgtgcagtatttgtacggggtggggtcaagcatcgcgtcctgggccattaaatgggagtacgtcgtcctcctgttccttctgctcgcagacgcagcgtctgctcttgcttgtggatgatgttactcatatcccaagcggaggcggctttggagaacctcgtggtactcaatgcagcatccctggccggggcgcacggtcttgtacccttcctcgtgttcttctgctttgcgtggtcctgaagggtaggtgggtgcccggagcggtctacgccctctacgggatgtggcctctcctcctgctcttgttggcgttgccccagcgagcatacgcactggacacggaggtggccgcgtcgtgtggcgcgttgttcttgtcgggttgatggcgctgactctgtcaccatattacaagcactatatcagctggtgcatgtggtggcttcagtactttctgaccagagcagaagcgcaactgcacgtgtgggttccccctctcaacgtccaggggggcgtgacgccgtcatcttactcacgtgtgttgtacacccgactttggtatttgacatcaccaaactactcctggccgttatcgggcccctttggatccttcaagccagtttgcttaaagtacctacttcgtgcgcgttcagggccttctccgaatctgcgcactagcgcggaaaatggccggaggccattacgtgcaaatggccatcatcaagttaggggcgcttactggcacctatgtctacaaccatctcactccccttcagactgggcgcacaacggcctgcgagatctggccgtggctgtggagccagtcgtcttctcccaaatggagaccaagctcatcacgtggggggcagacaccgccgcgtgcggtgacatcatcgacggctgcccgtctccgcccgtaggggccgggagatattgctcgggccggccgatggaatggtctccaaggggtggaggttgctggcgcccatcacagcgtacgcccagcagacaaggggcctcctagggtgtataatcaccagccgactggccgggacaaaaaccaagcggagggtgaggtccagattgtgtcaactgctgcccaaactttcctggcaacgtgcatcaatggggtatgctggactgtctaccacggggccggaacgaggaccttgcatcacccaagggtcctgttattcagatgtacaccaatgtggacaaagacctcgtgggctggcccgcccctcaaggtacccgctcattgacaccctgcacctgcggctcctcggacctttacttggtcacgaggcacgcgatgtcattcccgtgcgccggcgaggtgatagcagaggcagcctactttcgccccggcccatttcctacttgaaaggctcctcggggggtccactgttgtgccccgcggggcacgccgtgggcatatcagggccgcggtgtgcacccgtggagtggctaaagcggtggactttatccctgtggagaacctagagacaaccatgaggtccccggtgttctcggacaactcctctccaccagcagtgccccagagcttccaggtggctccctgcatgctcccaccggcagcggtaaaagcaccaaggtcccggccgcatacgctgctcagggctacaaggtgctagtgctcaacccctctgttgccgcaacactggcctttggcgcttacatgtccaggcccatggggtcgatcctaatgtcaggaccggggtgagaacaattaccactggcagcccaatcacgtactccacctacggcaagttccttgctgacggcgggtgctcggggggtgcctatgacataataatttgtgacggtgccactccacggatgccacgtccatcttgggcatcggcactgtccttgaccaagcagagaccgcgggggcgaggctggttgtgctcgccaccgctacccctccgggctccgtcaccgtgccccatctaacatcgaggaggttgctctgtccaccaccggagaggtccccttttacggcaaggctatccccctcgaggtaatcaagggggggagacatctcatcttctgtcactcaaaaaagaagtgcgacgagctcgccgcaaagcggtcgcgttgggcatcaatgccgtggcctactaccgtggccttgacgtgtctgtcatcccgaccagcggcgatgttgtcgtcgtggcgaccgatgctctcatgaccggctatactggcgacttcgaccggtgatagactgcaacacgtgtgtcacccaaacagtcgacttcagccttgaccctaccttcaccattgagacaaccacgctcccccaggatgctgtctcccgtactcaacgccggggcaggaccggcagggggaagtcagcatctacagattcgtggcaccaggggagcgcccttccggcatgttcgactcgtccgtcctctgtgagtgctatgacgcgggctgtgcttggtatgagctcacgcccgctgagaccactgttaggctagagcgtacatgaacaccccggggcttcctgtgtgccaggaccatcttgagttttgggagggcgtttttacaggcctcacccacatagatgcccactttctatcccagacaaagcagagtggggagaaccttccttacctggagcgtaccaggccaccgtgtgcgctagggctcaagcccctcccccatcgtgggaccagatgtggaagtgtttgatccgcctcaagcccaccctccatgggccaacacctctgctatacagactgggcctgttcagaatgaagtcaccttgacgcacccagtcaccaaatacatcatgacatgca

SEQ ID NO: 597 - DNA, 4867 bp, Hepatitis C virus; identical to SEQ ID NO: 566

SEQ ID NO: 598 - DNA, 4867 bp, Hepatitis C virus
accaaccgtcgcccacaggacgtcaagttcccgggtggcggtcagatcgttggtggagtttacttgttgccgcgcaggggccctagattgggtgtgcgcgcgacgaggaagacttccgagcggtcgcacctcgtggtagacgtcagcctatccccaaggcacgtcggcccgagggcaggacctgggctcagcccgggtacccctggcccctctatggcaatgagggctgcgggtgggcgggatggctcctgtctcccgcggctctcggcctagttggggccccacggacccccggcgtaggtcgcgcaatttgggtaaggtcatcgataccctcacatgcggcttcgccgacctcatggggtacataccgctcgtcggcgcccctcttggaggcgtgccagggccctggcgcatggcgtccgggttctggaagacggcgtgaactatgcaacagggaatcttcctggttgctctttctctatcttccttctggctctgctctcttgcctgactgtgcccgctcagcctaccaagtgcgcaactctacggggctttaccatgtcaccaatgattgccctaactcgagcattgtgtacgaggcggccgatgccatcctgcacactccggggtgtgtcccttgcgtccgcgagggtaactcctcgagtgttgggtggcggtgacccccacggtagccactaaggacggcaagctccccacaaggcagcttcgacgtcacatcgatctgcttgtcgggagcgccaccctctgctcggccctctacgtgggggactgtgcgggtccgtctttcttgtcggtcagctgttcaccttctctcccaggcgccactggacgacgcaagactgcaattgttctatctatcccggccatataacgggtcaccgcatggcgtgggatatgatgatgaactggtccctacggcggcattggtagtagctcagctgctccggatcccacaagccatcttggacatgatcgccggtgctcactggggagtcctggcgggcatggcgtatttctccatggtggggaactgggcgaggtcttggtagtgctgctgctatttgccggcgtcgacgcgcaaacccgcgtcaccgggggaagtgtcgcctacaccacggctggtattgctaggtttttccaaccaggcgccaagcagaacatccagctgatcaacaccacggcagttggcacatcaatagcacggccttgaactgcaatgcaagccttgaaaccggctggttagcaggacttttctatcacaacagattcaactcttcaggctgtcctgagaggttggccagctgcgaagccttgccgactttgaccagggctggggccccatcagccatgccaatggaagcggccccgaccaccgcccctactgctggcactaccccccaaaaccttgtggtattgtgcccgcaaagaacgtgtgtggcccggtatttgcttcacccccagccccgtggtggtgggaacgaccgacagggcgggtgcgcctacctacaactggggcgcaaatgaaacggacgtcttcgtccttaacaacaccaggccaccgcagggcaattggtcggttgtacctggatgaactcaaccgggttcaccaaagtgtgcggagcgcccccttgtgccatcggaggggtgggcaacaacaccttgcactgccccactgattgtttccgcaagcatccggaagccacgtactctcggtcggttctggtccctggatcacacccaggtgcatggtccactacccgtataggctctggcattatccctgtaccatcaactacactttatttaaagtcaggatgtacgtgggtggggtcgagcacaggtggaagctgcctgcaactggacgcggggcgaacgttgtgatctggaagacagggacaggtctgagcttagcccgttgctgctgtccaccacacagtggcaggtcctcccatgttcctttacgaccctgccagccttgtccacggcctcatccacccccaccagaacattgtggacgtgcagtatttgtacggggtggggtcaagcatcgcgtcctgggccattaaatgggagtacgtcgtcctcctgttccttctgctcgcagacgcagcgtctgctcttgcttgtggatgatgttactcatatcccaagcggaggcggctttggagaacctcgtggtactcaatgcagcatccctggccgggacgcacggtcttgtacccttcctcgtgttcttctgctttgcgtggtcctgaagggtaggtgggtgcccggagcggtctacgccctctacgggatgtggcctctcctcctgctcttgttggcgttgccccagcgagcatacgcactggacacggaggtggccgcgtcgtgtggcgcgttgttcttgtcgggttgatggcgctgactctgtcaccatattacaagcactatatcagctggtgcatgtggtggcttcagtactttctgaccagagcagaagcgcaactgcacgtgtgggttccccctctcaacgtccaggggggcgtgacgccgtcatcttactcacgtgtgttgtacacccgactttggtatttgacatcaccaaactactcctggccgttatcgggcccctttggatccttcaagccagtttgcttaaagtacctacttcgtgcgcgttcagggccttctccgaatctgcgcactagcgcggaaaatggccggaggccattacgtgcaaatggccatcatcaagttaggggcgcttactggcacctatgtctacaaccatctcactccccttcagactgggcgcacaacggcctgcgagatctggccgtggctgtggagccagtcgtcttctcccaaatggagaccaagctcatcacgtggggggcagacaccgccgcgtgcggtgacatcatcgacggctgcccgtctccgcccgtaggggccgggagatattgctcgggccggccgatggaatggtctccaaggggtggaggttgctggcgcccatcacagcgtacgcccagcagacaaggggcctcctagggtgtataatcaccagccgactggccgggacaaaaaccaagcggagggtgaggtccagattgtgtcaactgctgcccaaactttcctggcaacgtgcatcaatggggtatgctggactgtctaccacggggccggaacgaggaccttgcatcacccaagggtcctgttattcagatgtacaccaatgtggacaaagacctcgtgggctggcccgcccctcaaggtacccgctcattgacaccctgcacctgcggctcctcggacctttacttggtcacgaggcacgcgatgtcattcccgtgcgccggcgaggtgatagcagaggcagcctactttcgccccggcccatttcctacttgaaaggctcctcggggggtccactgttgtgccccgcggggcacgccgtgggcatatcagggccgcggtgtgcacccgtggagtggctaaagcggtggactttatccctgtggagaacctagagacaaccatgaggtccccggtgttctcggacaactcctctccaccagcagtgccccagagcttccaggtggctctctgcatgctcccaccggcagcggtaaaagcaccaaggtcccggccgcatacgctgctcagggctacaaggtgctagtgctcaacccctctgttgccgcaacactggcctttggcgcttacatgtccaggcccatggggtcgatcctaatgtcaggaccggggtgagaacaattaccactggcagcccaatcacgtactccacctacggcaagttccttgctgacggcgggtgctcggggggtgcctatgacataataatttgtgacggtgccactccacggatgccacgtccatcttgggcatcggcactgtccttgaccaagcagagaccgcgggggcgaggctggttgtgctcgccaccgctacccctccgggctccgtcaccgtgccccatctaacatcgaggaggttgctctgtccaccaccggagagatccccttttacggcaaggctatccccctcgaggtaatcaagggggggagacatctcatcttctgtcactcaaaaaagaagtgcgacgagctcgccgcaaagcggtcgcgttgggcatcaatgccgtggcctactaccgtggccttgacgtgtctgtcatcccgaccagcggcgatgttgtcgtcgtggcgaccgatgctctcatgaccggctatactggcgacttcgaccggtgatagactgcaacacgtgtgtcacccaaacagtcgacttcagccttgaccctaccttcaccattgagacaaccacgctcccccaggatgctgtctcccgtactcaacgccggggcaggaccggcagggggaagtcagcatctacagattcgtggcaccaggggagcgcccttccggcatgttcgactcgtccgtcctctgtgagtgctatgacgcgggctgtgcttggtatgagctcacgcccgctgagaccactgttaggctagagcgtacatgaacaccccggggcttcctgtgtgccaggaccatcttgagttttgggagggcgtttttacaggcctcacccacatagatgcccactttctatcccagacaaagcagagtggggagaaccttccttacctggagcgtaccaggccaccgtgtgcgctagggctcaagcccctcccccatcgtgggaccagatgtggaagtgtttgatccgcctcaagcccaccctccatgggccaacacctctgctatacagactgggcctgttcagaatgaagtcaccttgacgcacccagtcaccaaatacatcatgacatgca

SEQ ID NO: 599 - DNA, 4867 bp, Hepatitis C virus; identical to SEQ ID NO: 566

SEQ ID NO: 600 - DNA, 4867 bp, Hepatitis C virus
accaaccgtcgcccacaggacgtcaagttcccgggtggcggtcagatcgttggtggagtttacttgttgccgcgcaggggccctagattgggtgtgcgcgcgacgaggaagacttccgagcggtcgcacctcgtggtagacgtcagcctatccccaaggcacgtcggcccgagggcaggacctgggctcagcccgggtacccctggcccctctatggcaatgagggctgcgggtgggcgggatggctcctgtctcccgcggctctcggcctagttggggccccacggacccccggcgtaggtcgcgcaatttgggtaaggtcatcgataccctcacatgcggcttcgccgacctcatggggtacataccgctcgtcggcgcccctcttggaggcgtgccagggccctggcgcatggcgtccgggttctggaagacggcgtgaactatgcgacagggaatcttcctggttgctctttctctatcttccttctggctctgctctcttgcctgactgtgcccgctcagcctaccaagtgcgcaactctacggggctttaccatgtcaccaatgattgccctaactcgagcattgtgtacgaggcggccgatgccatcctgcacactccggggtgtgtcccttgcgtccgcgagggtaactcctcgagtgttgggtggcggtgacccccacggtagccactaaggacggcaagctccccacaaggcagcttcgacgtcacatcgatctgcttgtcgggagcgccaccctctgctcggccctctacgtgggggactgtgcgggtccgtctttcttgtcggtcagctgttcaccttctctcccaggcgccactggacgacgcaagactgcaattgttctatctatcccggccatataacgggtcaccgcatggcgtgggatatgatgatgaactggtccctacggcggcattggtagtagctcagctgctccggatcccacaagccatcttggacatgatcgccggtgctcactggggagtcctggcgggcatggcgtatttctccatggtggggaactgggcgaggtcttggtagtgctgctgctatttgccggcgtcgacgcgcaaacccgcgtcaccgggggaagtgtcgcctacaccacggctggtattgctaggtttttccaaccaggcgccaagcagaacatccagctgatcaacaccacggcagttggcacatcaatagcacggccttgaactgcaatgcaagccttgaaaccggctggttagcaggacttttctatcacaacagattcaactcttcaggctgtcctgagaggttggccagctgcgaagccttgccgactttgaccagggctggggccccatcagccatgccaatggaagcggccccgaccaccgcccctactgctggcactaccccccaaaaccttgtggtattgtgcccgcaaagaacgtgtgtggcccggtatttgcttcacccccagccccgtggtggtgggaacgaccgacagggcgggtgcgcctacctacaactggggcgcaaatgaaacggacgtcttcgtccttaacaacaccaggccaccgcagggcaattggtcggttgtacctggatgaactcaaccgggttcaccaaagtgtgcggagcgcccccttgtgccatcggaggggtgggcaacaacaccttgcactgccccactgattgtttccgcaagcatccggaagccacgtactctcggtcggttctggtccctggatcacacccaggtgcatggtccactacccgtataggctctggcattatccctgtaccatcaactacactttatttaaagtcaggatgtacgtgggtggggtcgagcacaggtggaagctgcctgcaactggacgcggggcgaacgttgtgatctggaagacagggacaggtctgagcttagcccgttgctgctgtccaccacacagtggcaggtcctcccatgttcctttacgaccctgccagccttgtccacggcctcatccacctccaccagaacattgtggacgtgcagtatttgtacggggtggggtcaagcatcgcgtcctgggccattaaatgggagtacgtcgtcctcctgttccttctgctcgcagacgcagcgtctgctcttgcttgtggatgatgttactcatatcccaagcggaggcggctttggagaacctcgtggtactcaatgcagcatccctggccgggacgcacggtcttgtacccttcctcgtgttcttctgctttgcgtggtcctgaagggtaggtgggtgcccggagcggtctacgccctctacgggatgtggcctctcctcctgctcttgttggcgttgccccagcgagcatacgcactggacacggaggtggccgcgtcgtgtggcgcgttgttcttgtcgggttgatggcgctgactctgtcaccatattacaagcactatatcagctggtgcatgtggtggcttcagtactttctgaccagagcagaagcgcaactgcacgtgtgggttccccctctcaacgtccaggggggcgtgacgccgtcatcttactcacgtgtgttgtacacccgactttggtatttgacatcaccaaactactcctggccgttatcgggcccctttggatccttcaagccagtttgcttaaagtacctacttcgtgcgcgttcagggccttctccgaatctgcgcactagcgcggaaaatggccggaggccattacgtgcaaatggccatcatcaagttaggggcgcttactggcacctatgtctacaaccatctcactccccttcagactgggcgcacaacggcctgcgagatctggccgtggctgtggagccagtcgtcttctcccaaatggagaccaagctcatcacgtggggggcagacaccgccgcgtgcggtgacatcatcgacggctgcccgtctccgcccgtaggggccgggagatattgctcgggccggccgatggaatggtctccaaggggtggaggttgctggcgcccatcacagcgtacgcccagcagacaaggggcctcctagggtgtataatcaccagccgactggccgggacaaaaaccaagcggagggtgaggtccagattgtgtcaactgctgcccaaactttcctggcaacgtgcatcaatggggtatgctggactgtctaccacggggccggaacgaggaccttgcatcacccaagggtcctgttattcagatgtacaccaatgtggacaaagacctcgtgggctggcccgcccctcaaggtacccgctcattgacaccctgcacctgcggctcctcggacctttacttggtcacgaggcacgcgatgtcattcccgtgcgccggcgaggtgatagcagaggcagcctactttcgccccggcccatttcctacttgaaaggctcctcggggggtccactgttgtgccccgcggggcacgccgtgggcatatcagggccgcggtgtgcacccgtggagtggctaaagcggtggactttatccctgtggagaacctagagacaaccatgaggtccccggtgttctcggacaactcctctccaccagcagtgccccagagcttccaggtggctccctgcatgctcccaccggcagcggtaaaagcaccaaggtcccggccgcatacgctgctcagggctacaaggtgctagtgctcaacccctctgttgccgcaacactggcctttggcgcttacatgtccaggcccatggggtcgatcctaatgtcaggaccggggtgagaacaattaccactggcagcccaatcacgtactccacctacggcaagttccttgctgacggcgggtgctcggggggtgcctatgacataataatttgtgacggtgccactccacggatgccacgtccatcttgggcatcggcactgtccttgaccaagcagagaccgcgggggcgaggctggttgtgctcgccaccgctacccctccgggctccgtcaccgtgccccatctaacatcgaggaggttgctctgtccaccaccggagaggtccccttttacggcaaggctatccccctcgaggtaatcaagggggggagacatctcatcttctgtcactcaaaaaagaagtgcgacgagctcgccgcaaagcggtcgcgttgggcatcaatgccgtggcctactaccgtggccttgacgtgtctgtcatcccgaccagcggcgatgttgtcgtcgtggcgaccgatgctctcatgaccggctatactggcgacttcgaccggtgatagactgcaacacgtgtgtcacccaaacagtcgacttcagccttgaccctaccttcaccattgagacaaccacgctcccccaggatgctgtctcccgtactcaacgccggggcaggaccggcagggggaagtcagcatctacagattcgtggcaccaggggagcgcccttccggcatgttcgactcgtccgtcctctgtgagtgctatgacgcgggctgtgcttggtatgagctcacgcccgctgagaccactgttaggctagagcgtacatgaacaccccggggcttcctgtgtgccaggaccatcttgagttttgggagggcgtttttacaggcctcacccacatagatgcccactttctatcccagacaaagcagagtggggagaaccttccttacctggagcgtaccaggccaccgtgtgcgctagggctcaagcccctcccccatcgtgggaccagatgtggaagtgtttgatccgcctcaagcccaccctccatgggccaacacctctgctatacagactgggcctgttcagaatgaagtcaccttgacgcacccagtcaccaaatacatcatgacatgca

SEQ ID NO: 601 - DNA, 4867 bp, Hepatitis C virus; identical to SEQ ID NO: 566

SEQ ID NO: 602 - DNA, 4867 bp, Hepatitis C virus
accaaccgtcgcccacaggacgtcaagttcccgggtggcggtcagatcgttggtggagtttacttgttgccgcgcaggggccctagattgggtgtgcgcgcgacgaggaagacttccgagcggtcgcacctcgtggtagacgtcagcctatccccaaggcacgtcggcccgagggcaggacctgggctcagcccgggtacccctggcccctctatggcaatgagggctgcgggtgggcgggatggctcctgtctcccgcggctctcggcctagttggggccccacggacccccggcgtaggtcgcgcaatttgggtaaggtcatcgataccctcacatgcggcttcgccgacctcatggggtacataccgctcgtcggcgcccctcttggaggcgtgccagggccctggcgcatggcgtccgggttctggaagacggcgtgaactatgcaacagggaatcttcctggttgctctttctctatcttccttctggctctgctctcttgcctgactgtgcccgctcagcctaccaagtgcgcaactctacggggctttaccatgtcaccaatgattgccctaactcgagcattgtgtacgaggcggccgatgccatcctgcacactccggggtgtgtcccttgcgtccgcgagggtaactcctcgagtgttgggtggcggtgacccccacggtagccactaaggacggcaagctccccacaaggcagcttcgacgtcacatcgatctgcttgtcgggagcgccaccctctgctcggccctctacgtgggggactgtgcgggtccgtctttcttgtcggtcagctgttcaccttctctcccaggcgccactggacgacgcaagactgcaattgttctatctatcccggccatataacgggtcaccgcatggcgtgggatatgatgatgaactggtccctacggcggcattggtagtagctcagctgctccggatcccacaagccatcttggacatgatcgccggtgctcactggggagtcctggcgggcatggcgtatttctccatggtggggaactgggcgaggtcttggtagtgctgctgctatttgccggcgtcgacgcgcaaacccgcgtcaccgggggaagtgtcgcctacaccacggctggtattgctaggtttttccaaccaggcgccaagcagaacatccagctgatcaacaccacggcagttggcacatcaatagcacggccttgaactgcaatgcaagccttgaaaccggctggttagcaggacttttctatcacaacagattcaactcttcaggctgtcctgagaggttggccagctgcgaagccttgccgactttgaccagggctggggccccatcagccatgccaatggaagcggccccgaccaccgcccctactgctggcactaccccccaaaaccttgtggtattgtgcccgcaaagaacgtgtgtggcccggtatttgcttcacccccagccccgtggtggtgggaacgaccgacagggcgggtgcgcctacctacaactggggcgcaaatgaaacggacgtcttcgtccttaacaacaccaggccaccgcagggcaattggtcggttgtacctggatgaactcaaccgggttcaccaaagtgtgcggagcgcccccttgtgccatcggaggggtgggcaacaacaccttgcactgccccactgattgtttccgcaagcatccggaagccacgtactctcggtcggttctggtccctggatcacacccaggtgcatggtccactacccgtataggctctggcattatccctgtaccatcaactacactttatttaaagtcaggatgtacgtgggtggggtcgagcacaggtggaagctgcctgcaactggacgcggggcgaacgttgtgatctggaagacagggacaggtctgagcttagcccgttgctgctgtccaccacacagtggcaggtcctcccatgttcctttacgaccctgccagccttgtccacggcctcatccacctccaccagaacattgtggacgtgcagtatttgtacggggtggggtcaagcatcgcgtcctgggccattaaatgggagtacgtcgtcctcctgttccttctgctcgcagacgcagcgtctgctcttgcttgtggatgatgttactcatatcccaagcggaggcggctttggagaacctcgtggtactcaatgcagcatccctggccgggacgcacggtcttgtacccttcctcgtgttcttctgctttgcgtggtcctgaagggtaggtgggtgcccggagcggtctacgccctctacgggatgtggcctctcctcctgctcttgttggcgttgccccagcgagcatacgcactggacacggaggtggccgcgtcgtgtggcgcgttgttcttgtcgggttgatggcgctgactctgtcaccatattacaagcactatatcagctggtgcatgtggtggcttcagtactttctgaccagagcagaagcgcaactgcacgtgtgggttccccctctcaacgtccaggggggcgtgacgccgtcatcttactcacgtgtgttgtacacccgactttggtatttgacatcaccaaactactcctggccgttatcgggcccctttggatccttcaagccagtttgcttaaagtacctacttcgtgcgcgttcagggccttctccgaatctgcgcactagcgcggaaaatggccggaggccattacgtgcaaatggccatcatcaagttaggggcgcttactggcacctatgtctacaaccatctcactccccttcagactgggcgcacaacggcctgcgagatctggccgtggctgtggagccagtcgtcttctcccaaatggagaccaagctcatcacgtggggggcagacaccgccgcgtgcggtgacatcatcgacggctgcccgtctccgcccgtaggggccgggagatattgctcgggccggccgatggaatggtctccaaggggtggaggttgctggcgcccatcacagcgtacgcccagcagacaaggggcctcctagggtgtataatcaccagccgactggccgggacaaaaaccaagcggagggtgaggtccagattgtgtcaactgctgcccaaactttcctggcaacgtgcatcaatggggtatgctggactgtctaccacggggccggaacgaggaccttgcatcacccaagggtcctgttattcagatgtacaccaatgtggacaaagacctcgtgggctggcccgcccctcaaggtacccgctcattgacaccctgcacctgcggctcctcggacctttacttggtcacgaggcacgcgatgtcattcccgtgcgccggcgaggtgatagcagaggcagcctactttcgccccggcccatttcctacttgaaaggctcctcggggggtccactgttgtgccccgcggggcacgccgtgggcatatcagggccgcggtgtgcacccgtggagtggctaaagcggtggactttatccctgtggagaacctagagacaaccatgaggtccccggtgttctcggacaactcctctccaccagcagtgccccagagcttccaggtggctccctgcatgctcccaccggcagcggtaaaagcaccaaggtcccggccgcatacgctgctcagggctacaaggtgctagtgctcaacccctctgttgccgcaacactggcctttggcgcttacatgtccaggcccatggggtcgatcctaatgtcaggaccggggtgagaacaattaccactggcagcccaatcacgtactccacctacggcaagttccttgctgacggcgggtgctcggggggtgcctatgacataataatttgtgacggtgccactccacggatgccacgtccatcttgggcatcggcactgtccttgaccaagcagagaccgcgggggcgaggctggttgtgctcgccaccgctacccctccgggctccgtcaccgtgccccatctaacatcgaggaggttgccctgtccaccaccggagaggtccccttttacggcaaggctatccccctcgaggtaatcaagggggggagacatctcatcttctgtcactcaaaaaagaagtgcgacgagctcgccgcaaagcggtcgcgttgggcatcaatgccgtggcctactaccgtggccttgacgtgtctgtcatcccgaccagcggcgatgttgtcgtcgtggcgaccgatgctctcatgaccggctatactggcgacttcgaccggtgatagactgcaacacgtgtgtcacccaaacagtcgacttcagccttgaccctaccttcaccattgagacaaccacgctcccccaggatgctgtctcccgtactcaacgccggggcaggaccggcagggggaagtcagcatctacagattcgtggcaccaggggagcgcccttccggcatgttcgactcgtccgtcctctgtgagtgctatgacgcgggctgtgcttggtatgagctcacgcccgctgagaccactgttaggctagagcgtacatgaacaccccggggcttcctgtgtgccaggaccatcttgagttttgggagggcgtttttacaggcctcacccacatagatgcccactttctatcccagacaaagcagagtggggagaaccttccttacctggagcgtaccaggccaccgtgtgcgctagggctcaagcccctcccccatcgtgggaccagatgtggaagtgtttgatccgcctcaagcccaccctccatgggccaacacctctgctatacagactgggcctgttcagaatgaagtcaccttgacgcacccagtcaccaaatacatcatgacatgca

SEQ ID NO: 603 - DNA, 4867 bp, Hepatitis C virus
accaaccgtcgcccacaggacgtcaagttcccgggtggcggtcagatcgttggtggagtttacttgttgccgcgcaggggccctagattgggtgtgcgcgcgacgaggaagacttccgagcggtcgcacctcgtggtagacgtcagcctatccccaaggcacgtcggcccgagggcagggcctgggctcagcccgggtacccctggcccctctatggcaatgagggctgcgggtgggcgggatggctcctgtctcccgcggctcccggcctagttggggccccacggacccccggcgtaggtcgcgcaatttgggtaaggtcatcgataccctcacatgcggcttcgccgacctcatggggtacataccgctcgtcggcgcccctcttggaggcgtgccagggccctggcgcatggcgtccgggttctggaagacggcgtgaactatgcaacagggaatcttcctggttgctctttctctatcttccttctggctctgctctcttgcctgactgtgcccgctcagcctaccaagtgcgcaactctacggggctttaccatgtcaccaatgattgccctaactcgagcattgtgtacgaggcggccgatgccatcctgcacactccggggtgtgtcccttgcgtccgcgagggtaactcctcgagtgttgggtggcggtgacccccacggtggccactagggacggcaagctccccacaacgcagcttcgacgtcacatcgatctgcttgtcgggagcgccaccctctgctcggccctctacgtgggggactgtgcgggtccgtctttcttgtcggtcagctgttcaccttctctcccaggcagcactggacgacgcaagactgcaattgttctatctatcccggccatataacgggtcaccgcatggcgtgggatatgatgatgaactggtccctacggcggcattggtagtagctcagctgctccggatcccacaagccatcttggacatgatcgccggtgctcactggggagtcctggcgggcatggcgtatttctccatggtggggaactgggcgaggtcttggtagtgctgctgctatttgccggcgtcgacgcgtacacccgcgtcactgggggaagtgccgcctacaccacgtctggtcttgctaggctgttccaaccaggcgcccagcagaacatccagctgatcaacaccacggcagttggcacatcaatagcacggccttgaactgcaacgcaagccttgacaccggctggttagcaggacttttctattacagcaaattcaactcttcaggctgtcctgagaggttggccagctgcgaagccttgccgactttgaccagggctggggccccatcagccatgccaatggaagcggccccgaccaccgcccctactgctggcactaccccccaaaaccttgtggtattgtgcgcgcaaagagcgtgtgtggcccggtatttgcttcacccccagccccgtggtggtgggaacgaccgacagggcgggtgcgcctacctacaactggggcgcaaatgaaacggacgtcttcgtccttaacaacaccaggccaccgcggggcaattggtcggttgtacctggatgaactcaaccggattcaccaaagtgtgcggagcgcccccttgtgccatcggaggggtgggcaacaacaccttgcactgccccactgattgtttccgcaagcatccggaagccacgtactctcggtcggttccggtccctggatcacacccaggtgcatggtccactacccgtataggctctggcattatccctgtaccatcaactacactttatttaaagtcaggatgtacgtgggtggggtcgagcacaggtggaagctgcctgcaactggacgcggggcgaacgttgtgatctggaagacagggacaggtccgagcttagcccgttgctgctgtccaccacacagtggcaggtcctcccatgttcctttacgaccctgccagccttgtccacggcctcatccacctccaccagaacattgtggacgtgcagtatttgtacggggtggggtcaagcatcgcgtcctgggccattaaatgggagtacgtcgtcctcctgttccttctgctcgcagacgcagcgtctgctcttgcttgtggatgatgttactcatatcccaagcggaggcggccttggagaacctcgtggtactcaatgcagcatccctggccgggacgcacggtcttgtacccttcctcgtgttcttctgctttgcgtggtcctgaagggtaggtgggtgcccggagcggtctacgccctctacgggatgtggcctctcctcctgctcctgttggcgttgccccagcgggcatacgcactggacacggaggtggccgcgtcgtgtggcgcgttgttcttgtcgggttgatggcgctgactctgtcaccatattacaagcactatatcagctggtgcatgtggtggcttcagtactttctgaccagagcagaagcgcaactgcacgtgtgggttccccctctcaacgttcaggggggcgtgacgccgttatcttactcacgtgtgttgtacacccgactttggtatttgacatcaccaaactactcctggccgttatcgggcccctttggatccttcaagccagtttgcttaaagtacctacttcgtgcgcgttcagggccttctccggatctgcgcactagcgcggaaaatggccggaggccattacgtgcaaatggccatcatcaagttaggggcgcttactggcacctatgtctacaaccatctcactccccttcagactgggcgcacaacggcctgcgagatctggccgtggctgtggagccagtcgtcttctcccaaatggagaccaagctcatcacgtggggggcagacaccgccgcgtgcggtgacatcatcgacggctgcccgtctccgcccgtaggggccgggagatattgctcgggccggccgatggaatggtctccaaggggtggaggttgctggcgcccatcacagcgtacgcccagcagacaaggggcctcctagggtgtataatcaccagccgactggccgggacaaaaaccaagcggagggtgaggtccagattgtgtcaactgctgcccaaactttcctggcaacgtgcatcaatggggtatgctggactgtctaccacggggccggaacgaggaccttgcatcacccaagggtcctgttattcagatgtacaccaatgtggacaaagacctcgtgggctggcccgcccctcaaggtacccgctcattgacaccctgcacctgcggctcctcggacctttacctggtcacgaggcacgcgatgtcattcccgtgcgccggcgaggtgatagcagaggcagcctgctttcgccccggcccatttcctacttgaaaggctcctcggggggtccgctgttgtgccccgcggggcacgccgtgggcatttcagggccgcggtgtgcacccgtggagtggctaaagcggtggactttatccctgtggagaacctagagacaaccatgaggtccccggtgttctcggacaactcctctccaccagcagtgccccagagcttccaggtggctccctgcatgctcccaccggcagcggtaaaagcaccaaggtcccggccgcatacgctgctcagggctacaaggtgctagtgctcaacccctctgttgccgcaacactggcctttggcgcttacatgtccaggcccatggggtcgatcctaatgtcaggaccggggtgagaacaattaccactggcagcccaatcacgtactccacctacggcaagttccttgctgacggcgggtgctcggggggtgcctatgacataataatttgtgacggtgccactccacggatgccacgtctatcttgggcatcggtactgtccttgaccaagcagagaccgcgggggcgaggctggttgtgctcgccaccgctacccctccgggctccgtcaccgtgccccatctaacatcgaggaggttgctctgtccaccaccggagaggtccccttttacggcaaggctatccccctcgaggtaatcaagggggggagacatctcatcttctgtcactcaaaaaagaagtgcgacgagctcgccgcaaagcggtcgcgttgggcatcaatgccgtggcctactaccgtggccttgacgtgtccgtcatcccgaccagcggcgatgttgtcgtcgtggcgaccgatgctctcatgaccggctatactggcgacttcgaccggtgatagactgcaacacgtgtgtcacccaaacagtcgacttcagccttgaccctaccttcaccattgagacaaccacgctcccccaggatgctgtctcccgtactcaacgccggggcaggaccggcagggggaagtcagcatctacagattcgtggcaccgggggagcgcccttccggcatgttcgactcgtccgtcctctgtgagtgctatgacgcgggctgtgcttggtatgagctcacgcccgctgagaccactgttaggctagagcgtacatgaacaccccggggcttcctgtgtgccaggaccatcttgagttttgggagggcgtctttacaggcctcacccacatagatgcccactttctatcccagacaaagcagagtggggagaaccttccttacctggagcgtaccaggccaccgtgtgcgctagggctcaagcccctcccccatcgtgggaccagatgtggaagtgtttgatccgcctcaagcccaccctccatgggccaacacctctgctatacagactgggcctgttcagaatgaagtcaccttgacgcacccagtcaccaaatacatcatgacatgca

SEQ ID NO: 604 - DNA, 4867 bp, Hepatitis C virus; identical to SEQ ID NO: 566

SEQ ID NO: 605 - DNA, 4867 bp, Hepatitis C virus; identical to SEQ ID NO: 566

SEQ ID NO: 606 - DNA, 4867 bp, Hepatitis C virus
accaaccgtcgcccacaggacgtcaagttcccgggtggcggtcagatcgttggtggagtttacttgttgccgcgcaggggccctagattgggtgtgcgcgcgacgaggaagacttccgagcggtcgcacctcgtggtagacgtcagcctatccccaaggcacgtcggcccgagggcaggacctgggctcagcccgggtacccctggcccctctatggcaatgagggctgcgggtgggcgggatggctcctgtctcccgcggctctcggcctagttggggccccacggacccccggcgtaggtcgcgcaatttgggtaaggtcatcgataccctcacatgcggcttcgccgacctcatagggtacataccgctcgtcggcgcccctcttggaggcgtgccagggccctggcgcatggcgtccgggttctggaagacggcgtgaactatgcaacagggaatcttcctggttgctctttctctatcttccttctggctctgctctcttgcctgactgtgcccgctcagcctaccaagtgcgcaactctacggggctttaccatgtcaccaatgattgccctaactcgagcattgtgtacgaggcggccgatgccatcctgcacactccggggtgtgtcccttgcgtccgcgagggtaactcctcgagtgttgggtggcggtgacccccacggtagccactaaggacggcaagctccccacaaggcagcttcgacgtcacatcgatctgcttgtcgggagcgccaccctctgctcggccctctacgtgggggactgtgcgggtccgtctttcttgtcggtcagctgttcaccttctctcccaggcgccattggacgacgcaagactgcaattgttctatctatcccggccatataacgggtcaccgcatggcgtgggatatgatgatgaactggtccctacggcggcattggtagtagctcagctgctccggatcccacaagccatcttggacatgatcgccggtgctcactggggagtcctggcgggcatggcgtatttctccatggtggggaactgggcgaggtcttggtagtgctgctgctatttgccggcgtcgacgcgcaaacccgcgtcaccgggggaagtgtcgcctacaccacggctggtattgctaggtttttccaaccaggcgccaagcagaacatccagctgatcaacaccacggcagttggcacatcaatagcacggccttgaactgcaatgcaagccttgaaaccggctggttagcaggacttttctatcacaacagattcaactcttcaggctgtcctgagaggttggccagctgcgaagccttgccgactttgaccagggctggggccccatcagccatgccaatggaagcggccccgaccaccgcccctactgctggcactaccccccaaaaccttgtggtattgtgcccgcaaagaacgtgtgtggcccggtatttgcttcacccccagccccgtggtggtgggaacgaccgacagggcgggtgcgcctacctacaactggggcgcaaatgaaacggacgtcttcgtccttaacaacaccaggccaccgcagggcaattggtcggttgtacctggatgaactcaaccgggttcaccaaagtgtgcggagcgcccccttgtgccatcggaggggtgggcaacaacaccttgcactgccccactgattgtttccgcaagcatccggaagccacgtactctcggtcggttctggtccctggatcacacccaggtgcatggtccactacccgtataggctctggcattatccctgtaccatcaactacactttatttaaagtcaggatgtacgtgggtggggtcgagcacaggtggaagctgcctgcaactggacgcggggcgaacgttgtgatctggaagacagggacaggtctgagcttagcccgttgctgctgtccaccacacagtggcaggtcctcccatgttcctttacgaccctgccagccttgtccacggcctcatccacctccaccagaacattgtggacgtgcagtatttgtacggggtggggtcaagcatcgcgtcctgggccattaaatgggagtacgtcgtcctcctgttccttctgctcgcagacgcagcgtctgctcttgcttgtggatgatgttactcatatcccaagcggaggcggctttggagaacctcgtggtactcaatgcagcatccctggccgggacgcacggtcttgtacccttcctcgtgttcttctgctttgcgtggtcctgaagggtaggtgggtgcccggagcggtctacgccctctacgggatgtggcctctcctcctgctcttgttggcgttgccccagcgagcatacgcactggacacggaggtggccgcgtcgtgtggcgcgttgttcttgtcgggttgatggcgctgactctgtcaccatattacaagcactatatcagctggtgcatgtggtggcttcagtactttctgaccagagcagaagcgcaactgcacgtgtgggttccccctctcaacgtccaggggggcgtgacgccgtcatcttactcacgtgtgttgtacacccgactttggtatttgacatcaccaaactactcctggccgttatcgggcccctttggatccttcaagccagtttgcttaaagtacctacttcgtgcgcgttcagggccttctccgaatctgcgcactagcgcggaaaatggccggaggccattacgtgcaaatggccatcatcaagttaggggcgcttactggcacctatgtctacaaccatctcactccccttcagactgggcgcacaacggcctgcgagatctggccgtggctgtggagccagtcgtcttctcccaaatggagaccaagctcatcacgtggggggcagacaccgccgcgtgcggtgacatcatcgacggctgcccgtctccgcccgtaggggccgggagatattgctcgggccggccgatggaatggtctccaaggggtggaggttgctggcgcccatcacagcgtacgcccagcagacaaggggcctcctagggtgtataatcaccagccgactggccgggacaaaaaccaagcggagggtgaggtccagattgtgtcaactgctgcccaaactttcctggcaacgtgcatcaatggggtatgctggactgtctaccacggggccggaacgaggaccttgcatcacccaagggtcctgttattcagatgtacaccaatgtggacaaagacctcgtgggctggcccgcccctcaaggtacccgctcattgacaccctgcacctgcggctcctcggacctttacttggtcacgaggcacgcgatgtcattcccgtgcgccggcgaggtgatagcagaggcagcctactttcgccccggcccatttcctacttgaaaggctcctcggggggtccactgttgtgccccgcggggcacgccgtgggcatatcagggccgcggtgtgcacccgtggagtggctaaagcggtggactttatccctgtggagaacctagagacaaccatgaggtccccggtgttctcggacaactcctctccaccagcagtgccccagagcttccaggtggctccctgcatgctcccaccggcagcggtaaaagcaccaaggtcccggccgcatacgctgctcagggctacaaggtgctagtgctcaacccctctgttgccgcaacactggcctttggcgcttacatgtccaggcccatggggtcgatcctaatgtcaggaccggggtgagaacaattaccactggcagcccaatcacgtactccacctacggcaagttccttgctgacggcgggtgctcggggggtgcctatgacataataatttgtgacggtgccactccacggatgccacgtccatcttgggcatcggcactgtccttgaccaagcagagaccgcgggggcgaggctggttgtgctcgccaccgctacccctccgggctccgtcaccgtgccccatctaacatcgaggaggttgctctgtccaccaccggagaggtccccttttacggcaaggctatccccctcgaggtaatcaagggggggagacatctcatcttctgtcactcaaaaaagaagtgcgacgagctcgccgcaaagcggtcgcgttgggcatcaatgccgtggcctactaccgtggccttgacgtgtctgtcatcccgaccagcggcgatgttgtcgtcgtggcgaccgatgctctcatgaccggctatactggcgacttcgaccggtgatagactgcaacacgtgtgtcacccaaacagtcgacttcagccttgaccctaccttcaccattgagacaaccacgctcccccaggatgctgtctcccgtactcaacgccggggcaggaccggcagggggaagtcagcatctacagattcgtggcaccaggggagcgcccttccggcatgttcgactcgtccgtcctctgtgagtgctatgacgcgggctgtgcttggtatgagctcacgcccgctgagaccactgttaggctagagcgtacatgaacaccccggggcttcctgtgtgccaggaccatcttgagttttgggagggcgtttttacaggcctcacccacatagatgcccactttctatcccagacaaagcagagtggggagaaccttccttacctggagcgtaccaggccaccgtgtgcgctagggctcaagcccctcccccatcgtgggaccagatgtggaagtgtttgatccgcctcaagcccaccctccatgggccaacacctctgctatacagactgggcctgttcaggatgaagtcaccttgacgcacccagtcaccaaatacatcatgacatgca

SEQ ID NO: 607 - DNA, 4867 bp, Hepatitis C virus
accaaccgtcgcccacaggacgtcaagttcccgggtggcggtcagatcgttggtggagtttacttgttgccgcgcaggggccctagattgggtgtgcgcgcgacgaggaagacttccgagcggtcgcacctcgtggtagacgtcagcctatccccaaggcacgtcggcccgagggcaggacctgggctcagcccgggtacccctggcccctctatggcaatgagggctgcgggtgggcgggatggctcctgtctcccgcggctctcggcctagttggggccccacggacccccggcgtaggtcgcgcaatttgggtaaggtcatcgataccctcacatgcggcttcgccgacctcatggggtacataccgctcgtcggcgcccctcttggaggcgtgccagggccctggcgcatggcgtccgggttctggaagacggcgtgaactatgcaacagggaatcttcctggttgctctttctctatcttccttctggctctgctctcttgcctgactgtgcccgctcagcctaccaagtgcgcaactctacggggctttaccatgtcaccaatgattgccctaactcgagcattgtgtacgaggcggccgatgccatcctgcacactccggggtgtgtcccttgcgtccgcgagggtaactcctcgagtgttgggtggcggtgacccccacggtagccactaaggacggcaagctccccacaaggcagcttcgacgtcacatcgatctgcttgtcgggagcgccaccctctgctcggccctctacgtgggggactgtgcgggtccgtctttcttgtcggtcagctgttcaccttctctcccaggcgccactggacgacgcaagactgcaattgttctatctatcccggccatataacgggtcaccgcatggcgtgggatatgatgatgaactggtccctacggcggcattggtagtagctcagctgctccggatcccacaagccatcttggacatgatcgccggtgctcactggggagtcctggcgggcatggcgtatttctccatggtggggaactgggcgaggtcttggtagtgctgctgctatttgccggcgtcgacgcgcaaacccgcgtcaccgggggaagtgtcgcctacaccacggctggtattgctaggtttttccaaccaggcgccaagcagaacatccagctgatcaacaccacggcagttggcacatcaatagcacggccttgaactgcaatgcaagccttgaaaccggctggttagcaggacttttctatcacaacagattcaactcttcaggctgtcctgagaggttggccagctgcgaagccttgccgactttgaccagggctggggccccatcagccatgccaatggaagcggccccgaccaccgcccctactgctggcactaccccccaaaaccttgtggtattgtgcccgcaaagaacgtgtgtggcccggtatttgcttcacccccagccccgtggtggtgggaacgaccgacagggcgggtgcgcctacctacaactggggcgcaaatgaaacggacgtcttcgtccttaacaacaccaggccaccgcagggcaattggtcggttgtacctggatgaactcaaccgggttcaccaaagtgtgcggagcgcccccttgtgccatcggaggggtgggcaacaacaccttgcactgccccactgattgtttccgcaagcatccggaagccacgtactctcggtcggttctggtccctggatcacacccaggtgcatggtccactacccgtataggctctggcattatccctgtaccatcaactacactttatttaaagtcaggatgtacgtgggtggggtcgagcacaggtggaagctgcctgcaactggacgcggggcgaacgttgtgatctggaagacagggacaggtctgagcttagcccgttgctgctgtccaccacacagtggcaggtcctcccatgttcctttacgaccctgccagccttgtccacggcctcatccacctccaccagaacattgtggacgtgcagtatttgtacggggtggggtcaagcatcgcgtcctgggccattaaatgggagtacgtcgtcctcctgttccttctgctcgcagacgcagcgtctgctcttgcttgtggatgatgttactcatatcccaagcggaggcggctttggagaacctcgtggtactcaatgcagcatccctggccgggacgcacggtctcgtacccttcctcgtgttcttctgctttgcgtggtcctgaagggtaggtgggtgcccggagcggtctacgccctctacgggatgtggcctctcctcctgctcttgttggcgttgccccagcgagcatacgcactggacacggaggtggccgcgtcgtgtggcgcgttgttcttgtcgggttgatggcgctgactctgtcaccatattacaagcactatatcagctggtgcatgtggtggcttcagtactttctgaccagagcagaagcgcaactgcacgtgtgggttccccctctcaacgtccaggggggcgtgacgccgtcatcttactcacgtgtgttgtacacccgactttggtatttgacatcaccaaactactcctggccgttatcgggcccctttggatccttcaagccagtttgcttaaagtacctacttcgtgcgcgttcagggccttctccgaatctgcgcactagcgcggaaaatggccggaggccattacgtgcaaatggccatcatcaagttaggggcgcttactggcacctatgtctacaaccatctcactccccttcagactgggcgcacaacggcctgcgagatctggccgtggctgtggagccagtcgtcttctcccaaatggagaccaagctcatcacgtggggggcagacaccgccgcgtgcggtgacatcatcgacggctgcccgtctccgcccgtaggggccgggagatattgctcgggccggccgatggaatggtctccaaggggtggaggttgctggcgcccatcacagcgtacgcccagcagacaaggggcctcctagggtgtataatcaccagccgactggccgggacaaaaaccaagcggagggtgaggtccagattgtgtcaactgctgcccaaactttcctggcaacgtgcatcaatggggtatgctggactgtctaccacggggccggaacgaggaccttgcatcacccaagggtcctgttattcagatgtacaccaatgtggacaaagacctcgtgggctggcccgcccctcaaggtacccgctcattgacaccctgcacctgcggctcctcggacctttacttggtcacgaggcacgcgatgtcattcccgtgcgccggcgaggtgatagcagaggcagcctactttcgccccggcccatttcctacttgaaaggctcctcggggggtccactgttgtgccccgcggggcacgccgtgggcatatcagggccgcggtgtgcacccgtggagtggctaaagcggtggactttatccctgtggagaacctagagacaaccatgaggtccccggtgttctcggacaactcctctccaccagcagtgccccagagcttccaggtggctccctgcatgctcccaccggcagcggtaaaagcaccaaggtcccggccgcatacgctgctcagggctacgaggtgctagtgctcaacccctctgttgccgcaacactggcctttggcgcttacatgtccaggcccatggggtcgatcctaatgtcaggaccggggtgagaacaattaccactggcagcccaatcacgtactccacctacggcaagttccttgctgacggcgggtgctcggggggtgcctatgacataataatttgtgacggtgccactccacggatgccacgtccatcttgggcatcggcactgtccttgaccaagcagagaccgcgggggcgaggctggttgtgctcgccaccgctacccctccgggctccgtcaccgtgccccatctaacatcgaggaggttgctctgtccaccaccggagaggtccccttttacggcaaggctatccccctcgaggtaatcaagggggggagacatctcatcttctgtcactcaaaaaagaagtgcgacgagctcgccgcaaagcggtcgcgttgggcatcaatgccgtggcctactaccgtggccttgacgtgtctgtcatcccgaccagcggcgatgttgtcgtcgtggcgaccgatgctctcatgaccggctatactggcgacttcgaccggtgatagactgcaacacgtgtgtcacccaaacagtcgacttcagccttgaccctaccttcaccattgagacaaccacgctcccccaggatgctgtctcccgtactcaacgccggggcaggaccggcagggggaagtcagcatctacagattcgtggcaccaggggagcgcccttccggcatgttcgactcgtccgtcctctgtgagtgctatgacgcgggctgtgcttggtatgagctcacgcccgctgagaccactgttaggctagagcgtacatgaacaccccggggcttcctgtgtgccaggaccatcttgagttttgggagggcgtttttacaggcctcacccacatagatgcccactttctatcccagacaaagcagagtggggagaaccttccttacctggagcgtaccaggccaccgtgtgcgctagggctcaagcccctcccccatcgtgggaccagatgtggaagtgtttgatccgcctcaagcccaccctccatgggccaacacctctgctatacagactgggcctgttcagaatgaagtcaccttgacgcacccagtcaccaaatacatcatgacatgca

SEQ ID NO: 608 - DNA, 4867 bp, Hepatitis C virus
accaaccgtcgcccacaggacgtcaagttcccgggtggcggtcagatcgttggtggagtttacttgttgccgcgcaggggccctagattgggtgtgcgcgcgacgaggaagacttccgagcggtcgcacctcgtggtagacgtcagcctatccccaaggcacgtcggcccgagggcaggacctgggctcagcccgggtacccctggcccctctatggcaatgagggctgcgggtgggcgggatggctcctgtctcccgcggctctcggcctagttggggccccacggacccccggcgtaggtcgcgcaatttgggtaaggtcatcgataccctcacatgcggcttcgccgacctcatggggtacataccgctcgtcggcgcccctcttggaggcgtgccagggccctggcgcatggcgtccgggttctggaagacggcgtgaactatgcaacagggaatcttcctggttgctctttctctatcttccttctggctctgctctcttgcctgactgtgcccgctcagcctaccaagtgcgcaactctacggggctttaccatgtcaccaatgattgccctaactcgagcattgtgtacgaggcggccgatgccatcctgcacactccggggtgtgtcccttgcgtccgcgagggtaactcctcgagtgttgggtggcggtgacccccacggtagccactaaggacggcaagctccccacaaggcagcttcgacgtcacatcgatctgcttgtcgggagcgccaccctctgctcggccctctacgtgggggactgtgcgggtccgtctttcttgtcggtcagctgttcaccttctctcccaggcgccactggacgacgcaagactgcaattgttctatctatcccggccatataacgggtcaccgcatggcgtgggatatgatgatgaactggtccctacggcggcattggtagtagctcagctgctccggatcccacaagccatcttggacatgatcgccggtgctcactggggagtcctggcgggcatggcgtatttctccatggtggggaactgggcgaggtcttggtagtgctgctgctatttgccggcgtcgacgcgcaaacccgcgtcaccgggggaagtgtcgcctacaccacggctggtattgctaggtttttccaaccaggcgccaagcagaacatccagctgatcaacaccacggcagttggcacatcaatagcacggccttgaactgcaatgcaagccttgaaaccggctggttagcaggacttttctatcacaacagattcaactcttcaggctgtcctgagaggttggccagctgcgaagccttgccgactttgaccagggctggggccccatcagccatgccaatggaagcggccccgaccaccgcccctactgctggcactaccccccaaaaccttgtggtattgtgcccgcaaagaacgtgtgtggcccggtatttgcttcacccccagccccgtggtggtgggaacgaccgacagggcgggtgcgcctacctacaactggggcgcaaatgaaacggacgtcttcgtccttaacaacaccaggccaccgcagggcaattggtcggttgtacctggatgaactcaaccgggttcaccaaagtgtgcggagcgcccccttgtgccatcggaggggtgggcaacaacaccttgcactgccccactgattgtttccgcaagcatccggaagccacgtactctcggtcggttctggtccctggatcacacccaggtgcatggtccactacccgtataggctctggcattatccctgtaccatcaactacactttatttaaagtcaggatgtacgtgggtggggtcgagcacaggtggaagctgcctgcaactggacgcggggcgaacgttgtgatctggaagacagggacaggtctgagcttagcccgttgctgctgtccaccacacagtggcaggtcctcccatgttcctttacgaccctgccagccttgtccacggcctcatccacctccaccagaacattgtggacgtgcagtatttgtacggggtggggtcaagcatcgcgtcctgggccattaaatgggagtacgtcgtcctcctgttccttctgctcgcagacgcagcgtctgctcttgcttgtggatgatgttactcatatcccaagcggaggcggctttggagaacctcgtggtactcaatgcagcatccctggccgggacgcacggtcttgtacccttcctcgtgttcttctgctttgcgtggtcctgaagggtaggtgggtgcccggagcggtctacgccctctacgggatgtggcctctcctcctgctcttgttggcgttgccccagcgagcatacgcactggacacggaggtggccgcgtcgtgtggcgcgttgttcttgtcgggttgatggcgctgactctgtcaccatattacaagcactatatcagctggtgcatgtggtggcttcagtactttctgaccagagcagaagcgcaactgcacgtgtgggttccccctctcaacgtccaagggggcgtgacgccgtcatcttactcacgtgtgttgtacacccgactttggtatttgacatcaccaaactactcctggccgttatcgggcccctttggatccttcaagccagtttgcttaaagtacctacttcgtgcgcgttcagggccttctccgaatctgcgcactagcgcggaaaatggccggaggccattacgtgcaaatggccatcatcaagttaggggcgcttactggcacctatgtctacaaccatctcactccccttcagactgggcgcacaacggcctgcgagatctggccgtggctgtggagccagtcgtcttctcccaaatggagaccaagctcatcacgtggggggcagacaccgccgcgtgcggtgacatcatcgacggctgcccgtctccgcccgtaggggccgggagatattgctcgggccggccgatggaatggtctccaaggggtggaggttgctggcgcccatcacagcgtacgcccagcagacaaggggcctcctagggtgtataatcaccagccgactggccgggacaaaaaccaagcggagggtgaggtccagattgtgtcaactgctgcccaaactttcctggcaacgtgcatcaatggggtatgctggactgtctaccacggggccggaacgaggaccttgcatcacccaagggtcctgttattcagatgtacaccaatgtggacaaagacctcgtgggctggcccgcccctcaaggtacccgctcattgacaccctgcacctgcggctcctcggacctttacttggtcacgaggcacgcgatgtcattcccgtgcgccggcgaggtgatagcagaggcagcctactttcgccccggcccatttcctacttgaaaggctcctcggggggtccactgttgtgccccgcggggcacgccgtgggcatatcagggccgcggtgtgcacccgtggagtggctaaagcggtggactttatccctgtggagaacctagagacaaccatgaggtccccggtgttctcggacaactcctctccaccagcagtgccccagagcttccaggtggctccctgcatgctcccaccggcagcggtaaaagcaccaaggtcccggccgcatacgctgctcagggctacaaggtgctagtgctcaacccctctgttgccgcaacactggcctttggcgcttacatgtccaggcccatggggtcgatcctaatgtcaggaccggggtgagaacaattaccactggcagcccaatcacgtactccacctacggcaagttccttgctgacggcgggtgctcggggggtgcctatgacataataatttgtgacggtgccactccacggatgccacgtccatcttgggcatcggcactgtccttgaccaagcagagaccgcgggggcgaggctggttgtgctcgccaccgctacccctccgggctccgtcaccgtgccccatctaacatcgaggaggttgctctgtccaccaccggagaggtccccttttacggcaaggctatccccctcgaggtaatcaagggggggagacatctcatcttctgtcactcaaaaaagaagtgcgacgagctcgccgcaaagcggtcgcgttgggcatcaatgccgtggcctactaccgtggccttgacgtgtctgtcatcccgaccagcggcgatgttgtcgtcgtggcgaccgatgctctcatgaccggctatactggcgacttcgaccggtgatagactgcaacacgtgtgtcacccaaacagtcgacttcagccttgaccctaccttcaccattgagacaaccacgctcccccaggatgctgtctcccgtactcaacgccggggcaggaccggcagggggaagtcagcatctacagattcgtggcaccaggggagcgcccttccggcatgttcgactcgtccgtcctctgtgagtgctatgacgcgggctgtgcttggtatgagctcacgcccgctgagaccactgttaggctagagcgtacatgaacaccccggggcttcctgtgtgccaggaccatcttgagttttgggagggcgtttttacaggcctcacccacatagatgcccactttctatcccagacaaagcagagtggggagaaccttccttacctggagcgtaccaggccaccgtgtgcgctagggctcaagcccctcccccatcgtgggaccagatgtggaagtgtttgatccgcctcaagcccaccctccatgggccaacacctctgctatacagactgggcctgttcagaatgaagtcaccttgacgcacccagtcaccaaatacatcatgacatgca

SEQ ID NO: 609 - DNA, 4867 bp, Hepatitis C virus; identical to SEQ ID NO: 566

SEQ ID NO: 610 - DNA, 4867 bp, Hepatitis C virus
accaaccgtcgcccacaggacgtcaagttcccgggtggcggtcagatcgttggtggagtttacttgttgccgcgcaggggccctagattgggtgtgcgcgcgacgaggaagacttccgagcggtcgcacctcgtggtagacgtcagcctatccccaaggcacgtcggcccgagggcaggacctgggctcagcccgggtacccctggcccctctatggcaatgagggctgcgggtgggcgggatggctcctgtctcccgcggctctcggcctagttggggccccacggacccccggcgtaggtcgcgcaatttgggtaaggtcatcgataccctcacatgcggcttcgccgacctcatggggtacataccgctcgtcggcgcccctcttggaggcgtgccagggccctggcgcatggcgtccgggttctggaagacggcgtgaactatgcaacagggaatcttcctggttgctctttctctatcttccttctggctctgctctcttgcctgactgtgcccgctcagcctaccaagtgcgcaactctacggggctttaccatgtcaccaatgattgccctaactcgagcattgtgtacgaggcggccgatgccatcctgcacactccggggtgtgtcccttgcgtccgcgagggtaactcctcgagtgttgggtggcggtgacccccacggtagccactaaggacggcaagctccccacaaggcagcttcgacgtcacatcgatctgcttgtcgggagcgccaccctctgctcggccctctacgtgggggactgtgcgggtccgtctttcttgtcggtcagctgttcaccttctctcccaggcgccactggacgacgcaagactgcaattgttctatctatcccggccatataacgggtcaccgcatggcgtgggatatgatgatgaactggtccctacggcggcattggtagtagctcagctgctccggatcccacaagccatcttggacatgatcgccggtgctcactggggagtcctggcgggcatggcgtatttctccatggtggggaactgggcgaggtcttggtagtgctgctgctatttgccggcgtcgacgcgcaaacccgcgtcaccgggggaagtgtcgcctacaccacggctggtattgctaggtttttccaaccaggcgccaagcagaacatccagctgatcaacaccacggcagttggcacatcaatagcacggccttgaactgcaatgcaagccttgaaaccggctggttagcaggacttttctatcacaacagattcaactcttcaggctgtcctgagaggttggccagctgcgaagccttgccgactttgaccagggctggggccccatcagccatgccaatggaagcggccccgaccaccgcccctactgctggcactaccccccaaaaccttgtggtattgtgcccgcaaagaacgtgtgtggcccggtatttgcttcacccccagccccgtggtggtgggaacgaccgacagggcgggtgcgcctacctacaactggggcgcaaatgaaacggacgtcttcgtccttaacaacaccaggccaccgcagggcaattggtcggttgtacctggatgaactcaaccgggttcaccaaagtgtgcggagcgcccccttgtgccatcggaggggtgggcaacaacaccttgcactgccccactgattgtttccgcaagcatccggaagccacgtactctcggtcggttctggtccctggatcacacccaggtgcatggtccactacccgtataggctctggcattatccctgtaccatcaactacactttatttaaagtcaggatgtacgtgggtggggtcgagcacaggtggaagctgcctgcaactggacgcggggcgaacgttgtgatctggaagacagggacaggtctgagcttagcccgttgctgctgtccaccacacagtggcaggtcctcccatgttcctttacgaccctgccagccttgtccacggcctcatccacctccaccagaacattgtggacgtgcagtatttgtacggggtggggtcaagcatcgcgtcctgggccattaaatgggagtacgtcgtcctcctgttccttctgctcgcagacgcagcgtctgctcttgcttgtggatgatgttactcatatcccaagcggaggcggctttggagaacctcgtggtactcaatgcagcatccctggccgggacgcacggtcttgtacccttcctcgtgttcttctgctttgcgtggtcctgaagggtaggtgggtgcccggagcggtctacgccctctacgggatgtggcctctcctcctgctcttgttggcgttgccccagcgagcatacgcactggacacggaggtggccgcgtcgtgtggcgcgttgttcttgtcgggttgatggcgctgactctgtcaccatattacaagcactatatcagctggtgcatgtggtggcttcagtactttctgaccagagcagaagcgcaactgcacgtgtgggttccccctctcaacgtccaggggggcgtgacgccgtcatcttactcacgtgtgttgtacacccgactttggtatttgacatcaccaaactactcctggccgttatcgggcccctttggatccttcaagccagtttgcttaaagtacctacttcgtgcgcgttcagggccttttccgaatctgcgcactagcgcggaaaatggccggaggccattacgtgcaaatggccatcatcaagttaggggcgcttactggcacctatgtctacaaccatctcactccccttcagactgggcgcacaacggcctgcgagatctggccgtggctgtggagccagtcgtcttctcccaaatggagaccaagctcatcacgtggggggcagacaccgccgcgtgcggtgacatcatcgacggctgcccgtctccgcccgtaggggccgggagatattgctcgggccggccgatggaatggtctccaaggggtggaggttgctggcgcccatcacagcgtacgcccagcagacaaggggcctcctagggtgtataatcaccagccgactggccgggacaaaaaccaagcggagggtgaggtccagattgtgtcaactgctgcccaaactttcctggcaacgtgcatcaatggggtatgctggactgtctaccacggggccggaacgaggaccttgcatcacccaagggtcctgttattcagatgtacaccaatgtggacaaagacctcgtgggctggcccgcccctcaaggtacccgctcattgacaccctgcacctgcggctcctcggacctttacttggtcacgaggcacgcgatgtcattcccgtgcgccggcgaggtgatagcagaggcagcctactttcgccccggcccatttcctacttgaaaggctcctcggggggtccactgttgtgccccgcggggcacgccgtgggcatatcagggccgcggtgtgcacccgtggagtggctaaagcggtggactttatccctgtggagaacctagagacaaccatgaggtccccggtgttctcggacaactcctctccaccagcagtgccccagagcttccaggtggctccctgcatgctcccaccggcagcggtaaaagcaccaaggtcccggccgcatacgctgctcagggctacaaggtgctagtgctcaacccctctgttgccgcaacactggcctttggcgcttacatgtccaggcccatggggtcgatcctaatgtcaggaccggggtgagaacaattaccactggcagcccaatcacgtactccacctacggcaagttccttgctgacggcgggtgctcggggggtgcctatgacataataatttgtgacggtgccactccacggatgccacgtccatcttgggcatcggcactgtccttgaccaagcagagaccgcgggggcgaggctggttgtgctcgccaccgctacccctccgggctccgtcaccgtgccccatctaacatcgaggaggttgctctgtccaccaccggagaggtccccttttacggcaaggctatccccctcgaggtaatcaagggggggagacatctcatcttctgtcactcaaaaaagaagtgcgacgagctcgccgcaaagcggtcgcgttgggcatcaatgccgtggcctactaccgtggccttgacgtgtctgtcatcccgaccagcggcgatgttgtcgtcgtggcgaccgatgctctcatgaccggctatactggcgacttcgaccggtgatagactgcaacacgtgtgtcacccaaacagtcgacttcagccttgaccctaccttcaccattgagacaaccacgctcccccaggatgctgtctcccgtactcaacgccggggcaggaccggcagggggaagtcagcatctacagattcgtggcaccaggggagcgcccttccggcatgttcgactcgtccgtcctctgtgagtgctatgacgcgggctgtgcttggtatgagctcacgcccgctgagaccactgttaggctagagcgtacatgaacaccccggggcttcctgtgtgccaggaccatcttgagttttgggagggcgtttttacaggcctcacccacatagatgcccactttctatcccagacaaagcagagtggggagaaccttccttacctggagcgtaccaggccaccgtgtgcgctagggctcaagcccctcccccatcgtgggaccagatgtggaagtgtttgatccgcctcaagcccaccctccatgggccaacacctctgctatacagactgggcctgttcagaatgaagtcaccttgacgcacccagtcaccaaatacatcatgacatgca

SEQ ID NO: 611 - DNA, 4867 bp, Hepatitis C virus
accaaccgtcgcccacaggacgtcaagttcccgggtggcggtcagatcgttggtggagtttacttgttgccgcgcaggggccctagattgggtgtgcgcgcgacgaggaagacttccgagcggtcgcacctcgtggtagacgtcagcctatccccaaggcacgtcggcccgagggcaggacctgggctcagcccgggtacccctggcccctctatggcaatgagggctgcgggtgggcgggatggctcctgtctcccgcggctctcggcctagttggggccccacggacccccggcgtaggtcgcgcaatttgggtaaggtcatcgataccctcacatgcggcttcgccgacctcatggggtacataccgctcgtcggcgcccctcttggaggcgtgccagggccctggcgcatggcgtccgggttctggaagacggcgtgaactatgcaacagggaatcttcctggttgctctttctctatcttccttctggctctgctctcttgcctgactgtgcccgctcagcctaccaagtgcgcaactctacggggctttaccatgtcaccaatgattgccctaactcgagcattgtgtacgaggcggccgatgccatcctgcacactccggggtgtgtcccttgcgtccgcgagggtaactcctcgagtgttgggtggcggtgacccccacggtagccactaaggacggcaagctccccacaaggcagcttcgacgtcacatcgatctgcttgtcgggagcgccaccctctgctcggccctctacgtgggggactgtgcgggtccgtctttcttgtcggtcagctgttcaccttctctcccaggcgccactggacgacgcaagactgcaattgttctatctatcccggccatataacgggtcaccgcatggcgtgggatatgatgatgaactggtccctacggcggcattggtagtagctcagctgctccggatcccacaagccatcttggacatgatcgccggtgctcactggggagtcctggcgggcatggcgtatttctccatggtggggaactgggcgaggtcttggtagtgctgctgctatttgccggcgtcgacgcgcaaacccgcgtcaccgggggaagtgtcgcctacaccacggctggtattgctaggtttttccaaccaggcgccaagcagaacatccagctgatcaacaccacggcagttggcacatcaatagcacggccttgaactgcaatgcaagccttgaaaccggctggttagcaggacttttctatcacaacagattcaactcttcaggctgtcctgagaggttggccagctgcgaagccttgccgactttgaccagggctggggccccatcagccatgccaatggaagcggccccgaccaccgcccctactgctggcactaccccccaaaaccttgtggtattgtgcccgcaaagaacgtgtgtggcccggtatttgcttcacccccagccccgtggtggtgggaacgaccgacagggcgggtgcgcctacctacaactggggcgcaaatgaaacggacgtcttcgtccttaacaacaccaggccaccgcagggcaattggtcggttgtacctggatgaactcaaccgggttcaccaaagtgtgcggagcgcccccttgtgccatcggaggggtgggcaacaacaccttgcactgccccactgattgtttccgcaagcatccggaagccacgtactctcggtcggttctggtccctggatcacacccaggtgcatggtccactacccgtataggctctggcattatccctgtaccatcaactacactttatttaaagtcaggatgtacgtgggtggggtcgagcacaggtggaagctgcctgcaactggacgcggggcgaacgttgtgatctggaagacagggacaggtctgagcttagcccgttgctgctgtccaccacacagtggcaggtcctcccatgttcctttacgaccctgccagccttgtccacggcctcatccacctccaccagaacattgtggacgtgcagtatttgtacggggtggggtcaagcatcgcgtcctgggccattaaatgggagtacgtcgtcctcctgttccttctgctcgcagacgcagcgtctgctcttgcttgtggatgatgttactcatatcccaagcggaggcggctttggagaacctcgtggtactcaatgcagcatccctggccgggacgcacggtcttgtacccttcctcgtgttcttctgctttgcgtggtcctgaagggtaggtgggtgcccggagcggtctacgccctctacgggatgtggcctctcctcctgctcttgttggcgttgccccagcgagcatacgcactggacacggaggtggccgcgtcgtgtggcgcgttgttcttgtcgggttgatggcgctgactctgtcaccatattacaagcactatatcagctggtgcatgtggtggcttcagtactttctgaccagagcagaagcgcaactgcacgtgtgggttccccctctcaacgtccaggggggcgtgacgccgtcatcttactcacgtgtgttgtacacccgactttggtatttgacatcaccaaactactcctggccgttatcgggcccctttggatccttcaagccagtttgcttaaagtacctacttcgtgcgcgttcagggccttctccgaatctgcgcactagcgcggaaaatggccggaggccattacgtgcaaatggccatcatcaagttaggggcgcttactggcacctatgtctacaaccatctcactccccttcagactgggcgcacaacggcctgcgagatctggccgtggctgtggagccagtcgtcttctcccaaatggagaccaagctcatcacgtggggggcagacaccgccgcgtgcggtgacatcatcgacggctgcccgtctccgcccgtaggggccgggagatattgctcgggccggccgatggaatggtctccaaggggtggaggttgctggcgcccatcacagcgtacgcccagcagacaaggggcctcctagggtgtataatcaccagccgactggccgggacaaaaaccaagcggagggtgaggtccagattgtgtcaactgctgcccaaactttcctggcaacgtgcatcaatggggtatgctggactgtctaccacggggccggaacgaggaccttgcatcacccaagggtcctgttattcagatgtacaccaatgtggacaaagacctcgtgggctggcccgcccctcaaggtacccgctcattgacaccctgcacctgcggctcctcggacctttacttggtcacgaggcacgcgatgtcattcccgtgcgccggcgaggtgatagcagaggcagcctactttcgccccggcccatttcctacttgaaaggctcctcggggggtccactgttgtgccccgcggggcacgccgtgggcatatcagggccgcggtgtgcacccgtggagtggctaaagcggtggactttatccctgtggagaacctagagacaaccatgaggtccccggtgttctcggacaactcctctccaccagcagtgccccagagcttccaggtggctccctgcatgctcccaccggcagcggtaaaagcaccaaggtcccggccgcatacgctgctcagggctacaaggtgctagtgctcaacccctctgttgccgcaacactggcctttagcgcttacatgtccaggcccatggggtcgatcctaatgtcaggaccggggtgagaacaattaccactggcagcccaatcacgtactccacctacggcaagttccttgctgacggcgggtgctcggggggtgcctatgacataataatttgtgacggtgccactccacggatgccacgtccatcttgggcatcggcactgtccttgaccaagcagagaccgcgggggcgaggctggttgtgctcgccaccgctacccctccgggctccgtcaccgtgccccatctaacatcgaggaggttgctctgtccaccaccggagaggtccccttttacggcaaggctatccccctcgaggtaatcaagggggggagacatctcatcttctgtcactcaaaaaagaagtgcgacgagctcgccgcaaagcggtcgcgttgggcatcaatgccgtggcctactaccgtggccttgacgtgtctgtcatcccgaccagcggcgatgttgtcgtcgtggcgaccgatgctctcatgaccggctatactggcgacttcgaccggtgatagactgcaacacgtgtgtcacccaaacagtcgacttcagccttgaccctaccttcaccattgagacaaccacgctcccccaggatgctgtctcccgtactcaacgccggggcaggaccggcagggggaagtcagcatctacagattcgtggcaccaggggagcgcccttccggcatgttcgactcgtccgtcctctgtgagtgctatgacgcgggctgtgcttggtatgagctcacgcccgctgagaccactgttaggctagagcgtacatgaacaccccggggcttcctgtgtgccaggaccatcttgagttttgggagggcgtttttacaggcctcacccacatagatgcccactttctatcccagacaaagcagagtggggagaaccttccttacctggagcgtaccaggccaccgtgtgcgctagggctcaagcccctcccccatcgtgggaccagatgtggaagtgtttgatccgcctcaagcccaccctccatgggccaacacctctgctatacagactgggcctgttcagaatgaagtcaccttgacgcacccagtcaccaaatacatcatgacatgca

SEQ ID NO: 612 - DNA, 4867 bp, Hepatitis C virus
accaaccgtcgcccacaggacgtcaagttcccgggtggcggtcagatcgttggtggagtttacttgttgccgcgcaggggccctagattgggtgtgcgcgcgacgaggaagacttccgagcggtcgcacctcgtggtagacgtcagcctatccccaaggcacgtcggcccgagggcaggacctgggctcagcccgggtacccctggcccctctatggcaatgagggctgcgggtgggcgggatggctcctgtctcccgcggctctcggcctagttggggccccacggacccccggcgtaggtcgcgcaatttgggtaaggtcatcgataccctcacatgcggcttcgccgacctcatggggtacataccgctcgtcggcgcccctcttggaggcgtgccagggccctggcgcatggcgtccgggttctggaagacggcgtgaactatgcaacagggaatcttcctggttgctctttctctatcttccttctggctctgctctcttgcctgactgtgcccgctcagcctaccaagtgcgcaactctacggggctttaccatgtcaccaatgattgccctaactcgagcattgtgtacgaggcggccgatgccatcctgcacactccggggtgtgtcccttgcgtccgcgagggtaactcctcgagtgttgggtggcggtgacccccacggtagccactaaggacggcaagctccccacaaggcagcttcgacgtcacatcgatctgcttgtcgggagcgccaccctctgctcggccctctacgtgggggactgtgcgggtccgtctttcttgtcggtcagctgttcaccttctctcccaggcgccactggacgacgcaagactgcaattgttctatctatcccggccatataacgggtcaccgcatggcgtgggatatgatgatgaactggtccctacggcggcattggtagtagctcagctgctccggatcccacaagccatcttggacatgatcgccggtgctcactggggagtcctggcgggcatggcgtatttctccatggtggggaactgggcgaggtcttggtagtgctgctgctatttgccggcgtcgacgcgcaaacccgcgtcaccgggggaagtgtcgcctacgccacggctggtattgctaggtttttccaaccaggcgccaagcagaacatccagctgatcaacaccacggcagttggcacatcaatagcacggccttgaactgcaatgcaagccttgaaaccggctggttagcaggacttttctatcacaacagattcaactcttcaggctgtcctgagaggttggccagctgcgaagccttgccgactttgaccagggctggggccccatcagccatgccaatggaagcggccccgaccaccgcccctactgctggcactaccccccaaaaccttgtggtattgtgcccgcaaagaacgtgtgtggcccggtatttgcttcacccccagccccgtggtggtgggaacgaccgacagggcgggtgcgcctacctacaactggggcgcaaatgaaacggacgtcttcgtccttaacaacaccaggccaccgcagggcaattggtcggttgtacctggatgaactcaaccgggttcaccaaagtgtgcggagcgcccccttgtgccatcggaggggtgggcaacaacaccttgcactgccccactgattgtttccgcaagcatccggaagccacgtactctcggtcggttctggtccctggatcacacccaggtgcatggtccactacccgtataggctctggcattatccctgtaccatcaactacactttatttaaagtcaggatgtacgtgggtggggtcgagcacaggtggaagctgcctgcaactggacgcggggcgaacgttgtgatctggaagacagggacaggtctgagcttagcccgttgctgctgtccaccacacagtggcaggtcctcccatgttcctttacgaccctgccagccttgtccacggcctcatccacctccaccagaacattgtggacgtgcagtatttgtacggggtggggtcaagcatcgcgtcctgggccattaaatgggagtacgtcgtcctcctgttccttctgctcgcagacgcagcgtctgctcttgcttgtggatgatgttactcatatcccaagcggaggcggctttggagaacctcgtggtactcaatgcagcatccctggccgggacgcacggtcttgtacccttcctcgtgttcttctgctttgcgtggtcctgaagggtaggtgggtgcccggagcggtctacgccctctacgggatgtggcctctcctcctgctcttgttggcgttgccccagcgagcatacgcactggacacggaggtggccgcgtcgtgtggcgcgttgttcttgtcgggttgatggcgctgactctgtcaccatattacaagcactatatcagctggtgcatgtggtggcttcagtactttctgaccagagcagaagcgcaactgcacgtgtgggttccccctctcaacgtccaggggggcgtgacgccgtcatcttactcacgtgtgttgtacacccgactttggtatttgacatcaccaaactactcctggccgttatcgggcccctttggatccttcaagccagtttgcttaaagtacctacttcgtgcgcgttcagggccttctccgaatctgcgcactagcgcggaaaatggccggaggccattacgtgcaaatggccatcatcaagttaggggcgcttactggcacctatgtctacaaccatctcactccccttcagactgggcgcacaacggcctgcgagatctggccgtggctgtggagccagtcgtcttctcccaaatggagaccaagctcatcacgtggggggcagacaccgccgcgtgcggtgacatcatcgacggctgcccgtctccgcccgtaggggccgggagatattgctcgggccggccgatggaatggtctccaaggggtggaggttgctggcgcccatcacagcgtacgcccagcagacaaggggcctcctagggtgtataatcaccagccgactggccgggacaaaaaccaagcggagggtgaggtccagattgtgtcaactgctgcccaaactttcctggcaacgtgcatcaatggggtatgctggactgtctaccacggggccggaacgaggaccttgcatcacccaagggtcctgttattcagatgtacaccaatgtggacaaagacctcgtgggctggcccgcccctcaaggtacccgctcattgacaccctgcacctgcggctcctcggacctttacttggtcacgaggcacgcgatgtcattcccgtgcgccggcgaggtgatagcagaggcagcctactttcgccccggcccatttcctacttgaaaggctcctcggggggtccactgttgtgccccgcggggcacgccgtgggcatatcagggccgcggtgtgcacccgtggagtggctaaagcggtggactttatccctgtggagaacctagagacaaccatgaggtccccggtgttctcggacaactcctctccaccagcagtgccccagagcttccaggtggctccctgcatgctcccaccggcagcggtaaaagcaccaaggtcccggccgcatacgctgctcagggctacaaggtgctagtgctcaacccctctgttgccgcaacactggcctttggcgcttacatgtccaggcccatggggtcgatcctaatgtcaggaccggggtgagaacaattaccactggcagcccaatcacgtactccacctacggcaagttccttgctgacggcgggtgctcggggggtgcctatgacataataatttgtgacggtgccactccacggatgccacgtccatcttgggcatcggcactgtccttgaccaagcagagaccgcgggggcgaggctggttgtgctcgccaccgctacccctccgggctccgtcaccgtgccccatctaacatcgaggaggttgctctgtccaccaccggagaggtccccttttacggcaaggctatccccctcgaggtaatcaagggggggagacatctcatcttctgtcactcaaaaaagaagtgcgacgagctcgccgcaaagcggtcgcgttgggcatcaatgccgtggcctactaccgtggccttgacgtgtctgtcatcccgaccagcggcgatgttgtcgtcgtggcgaccgatgctctcatgaccggctatactggcgacttcgaccggtgatagactgcaacacgtgtgtcacccaaacagtcgacttcagccttgaccctaccttcaccattgagacaaccacgctcccccaggatgctgtctcccgtactcaacgccggggcaggaccggcagggggaagtcagcatctacagattcgtggcaccaggggagcgcccttccggcatgttcgactcgtccgtcctctgtgagtgctatgacgcgggctgtgcttggtatgagctcacgcccgctgagaccactgttaggctagagcgtacatgaacaccccggggcttcctgtgtgccaggaccatcttgagttttgggagggcgtttttacaggcctcacccacatagatgcccactttctatcccagacaaagcagagtggggagaaccttccttacctggagcgtaccaggccaccgtgtgcgctagggctcaagcccctcccccatcgtgggaccagatgtggaagtgtttgatccgcctcaagcccaccctccatgggccaacacctctgctatacagactgggcctgttcagaatgaagtcaccttgacgcacccagtcaccaaatacatcatgacatgca

SEQ ID NO: 613 - DNA, 4867 bp, Hepatitis C virus
accaaccgtcgcccacaggacgtcaagttcccgggtggcggtcagatcgttggtggagtttacttgttgccgcgcaggggccctagattgggtgtgcgcgcgacgaggaagacttccgagcggtcgcacctcgtggtagacgtcagcctatccccaaggcacgtcggcccgagggcaggacctgggctcagcccgggtacccctggcccctctatggcaatgagggctgcgggtgggcgggatggctcctgtctcccgcggctctcggcctagttggggccccacggacccccggcgtaggtcgcgcaatttgggtaaggtcatcgataccctcacatgcggcttcgccgacctcatggggtacataccgctcgtcggcgcccctcttggaggcgtgccagggccctggcgcatggcgtccgggttctggaagacggcgtgaactatgcaacagggaatcttcctggttgctctttctctatcttccttctggctctgctctcttgcctgactgtgcccgctcagcctaccaagtgcgcaactctacggggctttaccatgtcaccaatgattgccctaactcgagcattgtgtacgaggcggccgatgccatcctgcacactccggggtgtgtcccttgcgtccgcgagggtaactcctcgagtgttgggtggcggtgacccccacggtagccactaaggacggcaagctccccacaaggcagcttcgacgtcacatcgatctgcttgtcgggagcgccaccctctgctcggccctctacgtgggggactgtgcgggtccgtctttcttgtcggtcagctgttcaccttctctcccaggcgccactggacgacgcaagactgcaattgttctatctatcccggccacataacgggtcaccgcatggcgtgggatatgatgatgaactggtccctacggcggcattggtagtagctcagctgctccggatcccacaagccatcttggacatgatcgccggtgctcactggggagtcctggcgggcatggcgtatttctccatggtggggaactgggcgaggtcttggtagtgctgctgctatttgccggcgtcgacgcgcaaacccgcgtcaccgggggaagtgtcgcctacaccacggctggtattgctaggtttttccaaccaggcgccaagcagaacatccagctgatcaacaccacggcagttggcacatcaatagcacggccttgaactgcaatgcaagccttgaaaccggctggttagcaggacttttctatcacaacagattcaactcttcaggctgtcctgagaggttggccagctgcgaagccttgccgactttgaccagggctggggccccatcagccatgccaatggaagcggccccgaccaccgcccctactgctggcactaccccccaaaaccttgtggtattgtgcccgcaaagaacgtgtgtggcccggtatttgcttcacccccagccccgtggtggtgggaacgaccgacagggcgggtgcgcctacctacaactggggcgcaaatgaaacggacgtcttcgtccttaacaacaccaggccaccgcagggcaattggtcggttgtacctggatgaactcaaccgggttcaccaaagtgtgcggagcgcccccttgtgccatcggaggggtgggcaacaacaccttgcactgccccactgattgtttccgcaagcatccggaagccacgtactctcggtcggttctggtccctggatcacacccaggtgcatggtccactacccgtataggctctggcattatccctgtaccatcaactacactttatttaaagtcaggatgtacgtgggtggggtcgagcacaggtggaagctgcctgcaactggacgcggggcgaacgttgtgatctggaagacagggacaggtctgagcttagcccgttgctgctgtccaccacacagtggcaggtcctcccatgttcctttacgaccctgccagccttgtccacggcctcatccacctccaccagaacattgtggacgtgcagtatttgtacggggtggggtcaagcatcgcgtcctgggccattaaatgggagtacgtcgtcctcctgttccttctgctcgcagacgcagcgtctgctcttgcttgtggatgatgttactcatatcccaagcggaggcggctttggagaacctcgtggtactcaatgcagcatccctggccgggacgcacggtcttgtacccttcctcgtgttcttctgctttgcgtggtcctgaagggtaggtgggtgcccggagcggtctacgccctctacgggatgtggcctctcctcctgctcttgttggcgttgccccagcgagcatacgcactggacacggaggtggccgcgtcgtgtggcgcgttgttcttgtcgggttgatggcgctgactctgtcaccatattacaagcactatatcagctggtgcatgtggtggcttcagtactttctgaccagagcagaagcgcaactgcacgtgtgggttccccctctcaacgtccaggggggcgtgacgccgtcatcttactcacgtgtgttgtacacccgactttggtatttgacatcaccaaactactcctggccgttatcgggcccctttggatccttcaagccagtttgcttaaagtacctacttcgtgcgcgttcagggccttctccgaatctgcgcactagcgcggaaaatggccggaggccattacgtgcaaatggccatcatcaagttaggggcgcttactggcacctatgtctacaaccatctcactccccttcagactgggcgcacaacggcctgcgagatctggccgtggctgtggagccagtcgtcttctcccaaatggagaccaagctcatcacgtggggggcagacaccgccgcgtgcggtgacatcatcgacggctgcccgtctccgcccgtaggggccgggagatattgctcgggccggccgatggaatggtctccaaggggtggaggttgctggcgcccatcacagcgtacgcccagcagacaaggggcctcctagggtgtataatcaccagccgactggccgggacaaaaaccaagcggagggtgaggtccagattgtgtcaactgctgcccaaactttcctggcaacgtgcatcaatggggtatgctggactgtctaccacggggccggaacgaggaccttgcatcacccaagggtcctgttattcagatgtacaccaatgtggacaaagacctcgtgggctggcccgcccctcaaggtacccgctcattgacaccctgcacctgcggctcctcggacctttacttggtcacgaggcacgcgatgtcattcccgtgcgccggcgaggtgatagcagaggcagcctactttcgccccggcccatttcctacttgaaaggctcctcggggggtccactgttgtgccccgcggggcacgccgtgggcatatcagggccgcggtgtgcacccgtggagtggctaaagcggtggactttatccctgtggagaacctagagacaaccatgaggtccccggtgttctcggacaactcctctccaccagcagtgccccagagcttccaggtggctccctgcatgctcccaccggcagcggtaaaagcaccaaggtcccggccgcatacgctgctcagggctacaaggtgctagtgctcaacccctctgttgccgcaacactggcctttggcgcttacatgtccaggcccatggggtcgatcctaatgtcaggaccggggtgagaacaattaccactggcagcccaatcacgtactccacctacggcaagttccttgctgacggcgggtgctcggggggtgcctatgacataataatttgtgacggtgccactccacggatgccacgtccatcttgggcatcggcactgtccttgaccaagcagagaccgcgggggcgaggctggttgtgctcgccaccgctacccctccgggctccgtcaccgtgccccatctaacatcgaggaggttgctctgtccaccaccggagaggtccccttttacggcaaggctatccccctcgaggtaatcaagggggggagacatctcatcttctgtcactcaaaaaagaagtgcgacgagctcgccgcaaagcggtcgcgttgggcatcaatgccgtggcctactaccgtggccttgacgtgtctgtcatcccgaccagcggcgatgttgtcgtcgtggcgaccgatgctctcatgaccggctatactggcgacttcgaccggtgatagactgcaacacgtgtgtcacccaaacagtcgacttcagccttgaccctaccttcaccattgagacaaccacgctcccccaggatgctgtctcccgtactcaacgccggggcaggaccggcagggggaagtcagcatctacagattcgtggcaccaggggagcgcccttccggcatgttcgactcgtccgtcctctgtgagtgctatgacgcgggctgtgcttggtatgagctcacgcccgctgagaccactgttaggctagagcgtacatgaacaccccggggcttcctgtgtgccaggaccatcttgagttttgggagggcgtttttacaggcctcacccacatagatgcccactttctatcccagacaaagcagagtggggagaaccttccttacctggagcgtaccaggccaccgtgtgcgctagggctcaagcccctcccccatcgtgggaccagatgtggaagtgtttgatccgcctcaagcccaccctccatgggccaacacctctgctatacagactgggcctgttcagaatgaagtcaccttgacgcacccagtcaccaaatacatcatgacatgca

SEQ ID NO: 614 - DNA, 4867 bp, Hepatitis C virus
accaaccgtcgcccacaggacgtcaagttcccgggtggcggtcagatcgttggtggagtttacttgttgccgcgcaggggccctagattgggtgtgcgcgcgacgaggaagacttccgagcggtcgcacctcgtggtagacgtcagcctatccccaaggcacgtcggcccgagggcaggacctgggctcagcccgggtacccctggcccctctatggcaatgagggctgcgggtgggcgggatggctcctgtctcccgcggctctcggcctagttggggccccacggacccccggcgtaggtcgcgcaatttgggtaaggtcatcgataccctcacatgcggcttcgccgacctcatggggtacataccgctcgtcggcgcccctcttggaggcgtgccagggccctggcgcatggcgtccgggttctggaagacggcgtgaactatgcaacagggaatcttcctggttgctctttctctatcttccttctggctctgctctcttgcctgactgtgcccgctcagcctaccaagtgcgcaactctacggggctttaccatgtcaccaatgattgccctaactcgagcattgtgtacgaggcggccgatgccatcctgcacactccggggtgtgtcccttgcgtccgcgagggtaactcctcgagtgttgggtggcggtgacccccacggtagccactaaggacggcaagctccccacaaggcagcttcgacgtcacatcgatctgcttgtcgggagcgccaccctctgctcggccctctacgtgggggactgtgcgggtccgtctttcttgtcggtcagctgttcaccttctctcccaggcgccactggacgacgcaagactgcaattgttctatctatcccggccatataacgggtcaccgcatggcgtgggatatgatgatgaactggtccctacggcggcattggtagtagctcagctgctccggatcccacaagccatcttggacatgatcgccggtgctcactggggagtcctggcgggcatggcgtatttctccatggtgggaaactgggcgaggtcttggtagtgctgctgctatttgccggcgtcgacgcgcaaacccgcgtcaccgggggaagtgtcgcctacaccacggctggtattgctaggtttttccaaccaggcgccaagcagaacatccagctgatcaacaccacggcagttggcacatcaatagcacggctttgaactgcaatgcaagccttgaaaccggctggttagcaggacttttctatcacaacagattcaactcttcaggctgtcctgagaggttggccagctgcgaagccttgccgactttgaccagggctggggccccatcagccatgccaatggaagcggccccgaccaccgcccctactgctggcactaccccccaaaaccttgtggtattgtgcccgcaaagaacgtgtgtggcccggtatttgcttcacccccagccccgtggtggtgggaacgaccgacagggcgggtgcgcctacctacaactggggcgcaaatgaaacggacgtcttcgtccttaacaacaccaggccaccgcagggcaattggtcggttgtacctggatgaactcaaccgggttcaccaaagtgtgcggagcgcccccttgtgccatcggaggggtgggcaacaacaccttgcactgccccactgattgtttccgcaagcatccggaagccacgtactctcggtcggttctggtccctggatcacacccaggtgcatggtccactacccgtataggctctggcattatccctgtaccatcaactacactttatttaaagtcaggatgtacgtgggtggggtcgagcacaggtggaagctgcctgcaactggacgcggggcgaacgttgtgatctggaagacagggacaggtctgagcttagcccgttgctgctgtccaccacacagtggcaggtcctcccatgttcctttacgaccctgccagccttgtccacggcctcatccacctccaccagaacattgtggacgtgcagtatttgtacggggtggggtcaagcatcgcgtcctgggccattaaatgggagtacgtcgtcctcctgttccttctgctcgcagacgcagcgtctgctcttgcttgtggatgatgttactcatatcccaagcggaggcggctttggagaacctcgtggtactcaatgcagcatccctggccgggacgcacggtcttgtacccttcctcgtgttcttctgctttgcgtggtcctgaagggtaggtgggtgcccggagcggtctacgccctctacgggatgtggcctctcctcctgctcttgttggcgttgccccagcgagcatacgtactggacacggaggtggccgcgtcgtgtggcgcgttgttcttgtcgggttgatggcgctgactctgtcaccatattacaagcactatatcagctggtgcatgtggtggcttcagtactttctgaccagagcagaagcgcaactgcacgtgtgggttccccctctcaacgtccaggggggcgtgacgccgtcatcttactcacgtgtgttgtacacccgactttggtatttgacatcaccaaactactcctggccgttatcgggcccctttggatccttcaagccagtttgcttaaagtacctacttcgtgcgcgttcagggccttctccgaatctgcgcactagcgcggaaaatggccggaggccattacgtgcaaatggccatcatcaagttaggggcgcttactggcacctatgtctacaaccatctcactccccttcagactgggcgcacaacggcctgcgagatctggccgtggctgtggagccagtcgtcttctcccaaatggagaccaagctcatcacgtggggggcagacaccgccgcgtgcggtgacatcatcgacggctgcccgtctccgcccgtaggggccgggagatattgctcgggccggccgatggaatggtctccaaggggtggaggttgctggcgcccatcacagcgtacgcccagcagacaaggggcctcctagggtgtataatcaccagccgactggccgggacaaaaaccaagcggagggtgaggtccagattgtgtcaactgctgcccaaactttcctggcaacgtgcatcaatggggtatgctggactgtctaccacggggccggaacgaggaccttgcatcacccaagggtcctgttattcagatgtacaccaatgtggacaaagacctcgtgggctggcccgcccctcaaggtacccgctcattgacaccctgcacctgcggctcctcggacctttacttggtcacgaggcacgcgatgtcattcccgtgcgccggcgaggtgataacagaggcagcctactttcgccccggcccatttcctacttgaaaggctcctcggggggtccactgttgtgccccgcggggcacgccgtgggcatatcagggccgcggtgtgcacccgtggagtggctaaagcggtggactttatccctgtggagaacctagagacaaccatgaggtccccggtgttctcggacaactcctctccaccagcagtgccccagagcttccaggtggctccctgcatgctcccaccggcagcggtaaaagcaccaaggtcccggccgcatacgctgctcagggctacaaggtgctagtgctcaacccctctgttgccgcaacactggcctttggcgcttacatgtccaggcccatggggtcgatcctaatgtcaggaccggggtgagaacaattaccactggcagcccaatcacgtactccacctacggcaagttccttgctgacggcgggtgctcggggggtgcctatgacataataatttgtgacggtgccactccacggatgccacgtccatcttgggcatcggcactgtccttgaccaagcagagaccgcgggggcgaggctggttgtgctcgccaccgctacccctccgggctccgtcaccgtgccccatctaacatcgaggaggttgctctgtccaccaccggagaggtccccttttacggcaaggctatccccctcgaggtaatcaagggggggagacatctcatcttctgtcactcaaaaaagaagtgcgacgagctcgccgcaaagcggtcgcgttgggcatcaatgccgtggcctactaccgtggccttgacgtgtctgtcatcccgaccagcggcgatgttgtcgtcgtggcgaccgatgctctcatgaccggctatactggcgacttcgaccggtgatagactgcaacacgtgtgtcacccaaacagtcgacttcagccttgaccctaccttcaccattgagacaaccacgctcccccaggatgctgtctcccgtactcaacgccggggcaggaccggcagggggaagtcagcatctacagattcgtggcaccaggggagcgcccttccggcatgttcgactcgtccgtcctctgtgagtgctatgacgcgggctgtgcttggtatgagctcacgcccgctgagaccactgttaggctagagcgtacatgaacaccccggggcttcctgtgtgccaggaccatcttgagttttgggagggcgtttttacaggcctcacccacatagatgcccactttctatcccagacaaagcagagtggggagaaccttccttacctggagcgtaccaggccaccgtgtgcgctagggctcaagcccctcccccatcgtgggaccagatgtggaagtgtttgatccgcctcaagcccaccctccatgggccaacacctctgctatacagactgggcctgttcagaatgaagtcaccttgacgcacccagtcaccaaatacatcatgacatgca

SEQ ID NO: 615 - DNA, 4867 bp, Hepatitis C virus
accaaccgtcgcccacaggacgtcaagttcccgggtggcggtcagatcgttggtggagtttacttgttgccgcgcaggggccctagattgggtgtgcgcgcgacgaggaagacttccgagcggtcgcacctcgtggtagacgtcagcctatccccaaggcacgtcggcccgagggcaggacctgggctcagcccgggtacccctggcccctctatggcaatgagggctgcgggtgggcgggatggctcctgtctcccgcggctctcggcctagttggggccccacggacccccggcgtaggtcgcgcaatttgggtaaggtcatcgataccctcacatgcggcttcgccgacctcatggggtacataccgctcgtcggcgcccctcttggaggcgtgccagggccctggcgcatggcgtccgggttctggaagacggcgtgaactatgcaacagggaatcttcctggttgctctttctctatcttccttctggctctgctctcttgcctgactgtgcccgctcagcctaccaagtgcgcaactctacggggctttaccatgtcaccaatgattgccctaactcgagcattgtgtacgaggcggccgatgccatcctgcacactccggggtgtgtcccttgcgtccgcgagggtaactcctcgagtgttgggtggcggtgacccccacggtagccactaaggacggcaagctccccacaaggcagcttcgacgtcacatcgatctgcttgtcgggagcgccaccctctgctcggccctctacgtgggggactgtgcgggtccgtctttcttgtcggtcagctgttcaccttctctcccaggcgccactggacgacgcaagactgcaattgttctatctatcccggccatataacgggtcaccgcatggcgtgggatatgatgatgaactggtccctacggcggcattggtagtagctcagctgctccggatcccacaagccatcttggacatgatcgccggtgctcactggggagtcctggcgggcatggcgtatttctccatggtggggaactgggcgaggtcttggtagtgctgctgctatttgccggcgtcgacgcgcaaacccgcgtcaccgggggaagtgtcgcctacaccacggctggtattgctaggtttttccaaccaggcgccaagcagaacatccagctgatcaacaccacggcagttggcacatcaatagcacggccttgaactgcaatgcaagccttgaaaccggctggttagcaggacttttctatcacaacagattcaactcttcaggctgtcctgagaggttggccagctgcgaagccttgccgactttgaccagggctggggccccatcagccatgccaatggaagcggccccgaccaccgcccctactgctggcactaccccccaaaaccttgtggtattgtgcccgcaaagaacgtgtgtggcccggtatttgcttcacccccagccccgtggtggtgggaacgaccgacagggcgggtgcgcctacctacaactggggcgcaaatgaaacggacgtcttcgtccttaacaacaccaggccaccgcagggcaattggtcggttgtacctggatgaactcaaccgggttcaccaaagtgtgcggagcgcccccttgtgccatcggaggggtgggcaacaacaccttgcactgccccactgattgtttccgcaagcatccggaagccacgtactctcggtcggttctggtccctggatcacacccaggtgcatggtccactacccgtataggctctggcattatccctgtaccatcaactacactttatttaaagtcaggatgtacgtgggtggggtcgagcacaggtggaagctgcctgcaactggacgcggggcgaacgttgtgatctggaagacagggacaggtctgagcttagcccgttgctgctgtccaccacacagtggcaggtcctcccatgttcctttacgaccctgccagccttgtccacggcctcatccacctccaccagaacattgtggacgtgcagtatttgtacggggtggggtcaagcatcgcgtcctgggccattaaatgggagtacgttgtcctcctgttccttctgctcgcagacgcagcgtctgctcttgcttgtggatgatgttactcatatcccaagcggaggcggctttggagaacctcgtggtactcaatgcagcatccctggccgggacgcacggtcttgtacccttcctcgtgttcttctgctttgcgtggtcctgaagggtaggtgggtgcccggagcggtctacgccctctacgggatgtggcctctcctcctgctcttgttggcgttgccccagcgagcatacgcactggacacggaggtggccgcgtcgtgtggcgcgttgttcttgtcgggttgatggcgctgactctgtcaccatattacaagcactatatcagctggtgcatgtggtggcttcagtactttctgaccagagcagaagcgcaactgcacgtgtgggttccccctctcaacgtccaggggggcgtgacgccgtcatcttactcacgtgtgttgtacacccgactttggtatttgacatcaccaaactactcctggccgttatcgggcccctttggatccttcaagccagtttgcttaaagtacctacttcgtgcgcgttcagggccttctccgaatctgcgcactagcgcggaaaatggccggaggccattacgtgcaaatggccatcatcaagttaggggcgcttactggcacctatgtctacaaccatctcactccccttcagactgggcgcacaacggcctgcgagatctggccgtggccgtggagccagtcgtcttctcccaaatggagaccaagctcatcacgtggggggcagacaccgccgcgtgcggtgacatcatcgacggctgcccgtctccgcccgtaggggccgggagatattgctcgggccggccgatggaatggtctccaaggggtggaggttgctggcgcccatcacagcgtacgcccagcagacaaggggcctcctagggtgtataatcaccagccgactggccgggacaaaaaccaagcggagggtgaggtccagattgtgtcaactgctgcccaaactttcctggcaacgtgcatcaatggggtatgctggactgtctaccacggggccggaacgaggaccttgcatcacccaagggtcctgttattcagatgtacaccaatgtggacaaagacctcgtgggctggcccgcccctcaaggtacccgctcattgacaccctgcacctgcggctcctcggacctttacttggtcacgaggcacgcgatgtcattcccgtgcgccggcgaggtgatagcagaggcagcctactttcgccccggcccatttcctacttgaaaggctcctcggggggtccactgttgtgccccgcggggcacgccgtgggcatatcagggccgcggtgtgcacccgtggagtggctaaagcggtggactttatccctgtggagaacctagagacaaccatgaggtccccggtgttctcggacaactcctctccaccagcagtgccccagagcttccaggtggctccctgcatgctcccaccggcagcggtaaaagcaccaaggtcccggccgcatacgctgctcagggctacaaggtgctagtgctcaacccctctgttgccgcaacactggcctttggcgcttacatgtccaggcccatggggtcgatcctaatgtcaggaccggggtgagaacaattaccactggcagcccaatcacgtactccacctacggcaagttccttgctgacggcgggtgctcggggggtgcctatgacataataatttgtgacggtgccactccacggatgccacgtccatcttgggcatcggcactgtccttgaccaagcagagaccgcgggggcgaggctggttgtgctcgccaccgctacccctccgggctccgtcaccgtgccccatctaacatcgaggaggttgctctgtccaccaccggagaggtccccttttacggcaaggctatccccctcgaggtaatcaagggggggagacatctcatcttctgtcactcaaaaaagaagtgcgacgagctcgccgcaaagcggtcgcgttgggcatcaatgccgtggcctactaccgtggccttgacgtgtctgtcatcccgaccagcggcgatgttgtcgtcgtggcgaccgatgctctcatgaccggctatactggcgacttcgaccggtgatagactgcaacacgtgtgtcacccaaacagtcgacttcagccttgaccctaccttcaccattgagacaaccacgctcccccaggatgctgtctcccgtactcaacgccggggcaggaccggcagggggaagtcagcatctacagattcgtggcaccaggggagcgcccttccggcatgttcgactcgtccgtcctctgtgagtgctatgacgcgggctgtgcttggtatgagctcacgcccgctgagaccactgttaggctagagcgtacatgaacaccccggggcttcctgtgtgccaggaccatcttgagttttgggagggcgtttttacaggcctcacccacatagatgcccactttctatcccagacaaagcagagtggggagaaccttccttacctggagcgtaccaggccaccgtgtgcgctagggctcaagcccctcccccatcgtgggaccagatgtggaagtgtttgatccgcctcaagcccaccctccatgggccaacacctctgctatacagactgggcctgttcagaatgaagtcaccttgacgcacccagtcaccaaatacatcatgacatgca

SEQ ID NO: 616 - DNA, 4867 bp, Hepatitis C virus; identical to SEQ ID NO: 566

SEQ ID NO: 617 - DNA, 4866 bp, Hepatitis C virus
accaaccgtcgcccacaggacgtcaagttcccgggtggcggtcagatcgttggtggagtttacttgttgccgcgcaggggccctagattgggtgtgcgcgcgacgaggaagacttccgagcggtcgcacctcgtggtagacgtcagcctatccccaaggcacgtcggcccgagggcaggacctgggctcagcccgggtacccctggcccctctatggcaatgagggctgcgggtgggcgggatggctcctgtctcccgcggctctcggcctagttggggccccacggacccccggcgtaggtcgcgcaatttgggtaaggtcatcgataccctcacatgcggcttcgccgacctcatggggtacataccgctcgtcggcgcccctcttggaggcgtgccagggccctggcgcatggcgtccgggttctggaagacggcgtgaactatgcaacagggaatcttcctggttgctctttctctatcttccttctggctctgctctcttgcctgactgtgcccgctcagcctaccaagtgcgcaactctacggggctttaccatgtcaccaatgattgccctaactcgagcattgtgtacgaggcggccgatgccatcctgcacactccggggtgtgtcccttgcgtccgcgagggtaactcctcgagtgttgggtggcggtgacccccacggtagccactaaggacggcaagctccccacaaggcagcttcgacgtcacatcgatctgcttgtcgggagcgccaccctctgctcggccctctacgtgggggactgtgcgggtccgtctttcttgtcggtcagctgttcaccttctctcccaggcgccactggacgacgcaagactgcaattgttctatctatcccggccatataacgggtcaccgcatggcgtgggatatgatgatgaactggtccctacggcggcattggtagtagctcagctgctccggatcccacaagccatcttggacatgatcgccggtgctcactggggagtcctggcgggcatggcgtatttctccatggtggggaactgggcgaggtcttggtagtgctgctgctatttgccggcgtcgacgcgcaaacccgcgtcaccgggggaagtgtcgcctacaccacggctggtattgctaggtttttccaaccaggcgccaagcagaacatccagctgatcaacaccacggcagttggcacatcaatagcacggccttgaactgcaatgcaagccttgaaaccggctggttagcaggacttttctatcacaacagattcaactcttcaggctgtcctgagaggttggccagctgcgaagccttgccgactttgaccagggctggggccccatcagccatgccaatggaagcggccccgaccaccgcccctactgctggcactaccccccaaaaccttgtggtattgtgcccgcaaagaacgtgtgtggcccggtatttgcttcacccccagccccgtggtggtgggaacgaccgacagggcgggtgcgcctacctacaactggggcgcaaatgaaacggacgtcttcgtccttaacaacaccaggccaccgcagggcaattggtcggttgtacctggatgaactcaaccgggttcaccaaagtgtgcggagcgcccccttgtgccatcggaggggtgggcaacaacaccttgcactgccccactgattgtttccgcaagcatccggaagccacgtactctcggtcggttctggtccctggatcacacccaggtgcatggtccactacccgtataggctctggcattatccctgtaccatcaactacactttatttaaagtcaggatgtacgtgggtggggtcgagcacaggtggaagctgcctgcaactggacgcggggcgaacgttgtgatctggaagacagggacaggtctgagcttagcccgttgctgctgtccaccacacagtggcaggtcctcccatgttcctttacgaccctgccagccttgtccacggcctcatccacctccaccagaacattgtggacgtgcagtatttgtacggggtggggtcaagcatcgcgtcctgggccattaaatgggagtacgtcgtcctcctgttccttctgctcgcagacgcagcgtctgctcttgcttgtggatgatgttactcatatcccaagcggaggcggctttggagaacctcgtggtactcaatgcagcatccctggccgggacgcacggtcttgtacccttcctcgtgttcttctgctttgcgtggtcctgaagggtaggtgggtgcccggagcggtctacgccctctacgggatgtggcctctcctcctgctcttgttggcgttgccccagcgagcatacgcactggacacggaggtggccgcgtcgtgtggcgcgttgttcttgtcgggttgatggcgctgactctgtcaccatattacaagcactatatcagctggtgcatgtggtggcttcagtactttctgaccagagcagaagcgcaactgcacgtgtgggttccccctctcaacgtccaggggggcgtgacgccgtcatcttactcacgtgtgttgtacacccgactttggtatttgacatcaccaaactactcctggccgttatcgggcccctttggatccttcaagccagtttgcttaaagtacctacttcgtgcgcgttcagggccttctccgaatctgcgcactagcgcggaaaatggccggaggccattacgtgcaaatggccatcatcaagttaggggcgcttactggcacctatgtctacaaccatctcactccccttcagactgggcgcacaacggcctgcgagatctggccgtggctgtggagccagtcgtcttctcccaaatggagaccaagctcatcacgtggggggcagacaccgccgcgtgcggtgacatcatcgacggctgcccgtctccgcccgtaggggccgggagatattgctcgggccggccgatggaatggtctccaaggggtggaggttgctggcgcccatcacagcgtacgcccagcagacaaggggcctcctagggtgtataatcaccagccgactggccgggacaaaaaccaagcggagggtgaggtccagattgtgtcaactgctgcccaaactttcctggcaacgtgcatcaatggggtatgctggactgtctaccacggggccggaacgaggaccttgcatcacccaagggtcctgttattcagatgtacaccaatgtggacaaagacctcgtgggctggcccgcccctcaaggtacccgctcattgacaccctgcacctgcggctcctcggacctttacttggtcacgaggcacgcgatgtcattcccgtgcgccggcgaggtgatagcagaggcagcctactttcgccccggcccatttcctacttgaaaggctcctcggggggtccactgttgtgccccgcggggcacgccgtgggcatatcagggccgcggtgtgcacccgtggagtggctaaagcggtggactttatccctgtggagaacctagagacaaccatgaggtccccggtgttctcggacaactcctctccaccagcagtgccccagagcttccaggtggctccctgcatgctcccaccggcagcggtaaagcaccaaggtcccggccgcatacgctgctcagggctacaaggtgctagtgctcaacccctctgttgccgcaacactggcctttggcgcttacatgtccaggcccatggggtcgatcctaatgtcaggaccggggtgagaacaattaccactggcagcccaatcacgtactccacctacggcaagttccttgctgacggcgggtgctcggggggtgcctatgacataataatttgtgacgatgccactccacggatgccacgtccatcttgggcatcggcactgtccttgaccaagcagagaccgcgggggcgaggctggttgtgctcgccaccgctacccctccgggctccgtcaccgtgccccatctaacatcgaggaggttgctctgtccaccaccggagaggtccccttttacggcaaggctatccccctcgaggtaatcaagggggggagacatctcatcttctgtcactcaaaaaagaagtgcgacgagctcgccgcaaagctgtcgcgttgggcatcaatgccgtggcctactaccgtggccttgacgtgtctgtcatcccgaccagcggcgatgttgtcgtcgtggcgaccgatgctctcatgaccggctatactggcgacttcgactggtgatagactgcaacacgtgtgtcacccaaacagtcgacttcagccttgaccctaccttcaccattgagacaaccacgctcccccaggatgctgtctcccgtactcaacgccggggcaggaccggcagggggaagtcaggatctacagattcgtggcaccaggggagcgcccttccggcatgttcgactcgtccgtcctctgtgagtgctatgacgcgggctgtgcttggtatgagctcacgcccgctgagaccactgttaggctacagcgtacatgaacaccccggggcttcctgtgtgccaggaccatcttgagttttgggagggcgtttttacaggcctcacccacatagatgcccactttctatcccagacaaagcagagtggggagaaccttccttacctggtgcgtaccaggccaccgtgtgcgctagggctcaagcccctcccccatcgtgggaccagatgtggaagtgtttgatccgcctcaagcccaccctccatgggccaacacctctgctatacagactgggcgtgttcagaatgaagtcaccttgacgcacccagtcaccaaatacatcatgacatgca

SEQ ID NO: 618 - DNA, 4869 bp, Hepatitis C virus
ccgcccacaggacgtcaagttcccgggcggtggtcagatcgttggtggagtttacctgttgccgcgcaggggccccaggttgggtgtgcgcgcgactaggaagacttccgagcggtcgcaacctcgtgaaggcgacaacctatccccaaggctcgccagcccgagggtagggcctgggctcagcctgggtacccttggcccctctatggcaatgagggcttggggtgggcaggatggctcctgtcaccccgtggtctcggcctagttggggccccacggacccccggcgtaggtcgcgtaatttgggtaaggtcatcgatacccttacatgcggcttcgccgacctcatggggtacattccgctcgtcggcgcccccttagggggcgctgccaggccctggcgcatggcgtccgggttctggaggacggcgtgaattatgcaacagggaatttgcccggttgctctttctctatcttccttttggctttgctgtcctgtttgaccatcccagtttccgcttagaggtgcgcaacgtgtccggggtgtatcatgtcacgaacgactgctccaacgcaagcattgtgtacgaggcaacggacgtgatcatgcatacccccgggtgcgtgccctgcgttcgggagggcaatacctcccgctgctggcggcgctcactcccacactcgcggccaggaattccagcgtcccgactacgacaatacgacggcacgtcgatttgctcgttggggcggctgctttctgttccgctatgtacgtgggggatctctgcggtctgtttttctcgtctcccagctgttcaccttctcgcctcgccggcatgagacggtacaggactgcaattgctcaatctatcccggccacgtatcaggtcaccgcatggcttgggatatgatgatgaactggtcacctacacagccctagtggtatcgcagctactccggatcccacaagctgtcgtggacatggtggcgggggcccactggggagtcctggcgggccttgcctactattccatggtggggaactgggctaaggtcttattgtgatgctactttttgccggcgtcgacgggagcacctacacgacagggggggcgctgggccgtaccacccacgggcttacgtccttcctttcaattgggccgtctcagaaaatccagcttataaataccaacggcagcggcacatcaacagaactgccttgaactgcaatgagtccctccacactggatggctcgccgcgttgttctacacaaacaagttcaacgcgtccggatgcccggagcgcatggccagctgccgccccatgacacgttcgatcaggggtggggtcccatcactcacgatgggcagggcagctcggaccagaggccctactgttggcactacgcaccccgaccgtgtggtattgtacccgcgtcggaggtgtgtggtccagtgtattgcttcccccgagccccgttgtggtggggacgaccgatcgttccggcgtccctacgtatagctggggggggaatgagacggacgtgctgctcctcaacaacacgcggccgccgcaaggcaactggttcggctgacatggatgaatagcactgggttcaccaaaacgtgcgggggccccccgtgtaacatcagggggagcggcaataacactttgacctgccccacggactgcttccggaagcaccccgaggccacttacaccaaatgcggttcgggccttggttgacacctaggtgcatggttgactacccatacaggctttggcactacccctgcactgtcaacttcaccatcttcaaggttaggatgtatgtggggggcgtggagcacaggctcaacgcgcgtgcaattggactcgaggagagcgttgtgatttggaggacagggatagatcagagcttagcccgctgctgctgtctacaacagagtggcagatactgccctgctccttcaccaccttaccggctctgtccactggtttgtccatctccatcagaacatcgtggacgtgcaatacctgtacggtatagggtcggcggttgtctcctttgcaatcaagtgggagtacatcgtgttgctcttccttctcctggcggacgcgcgcgtctggcctgcttgtggatgatgctactgatagctcaggccgaggctgccctagagaacctggtggttctcaatgcggcgtccgtggccggggcgcatggcctcctctcttttcttgtgttcttctgtgctgcctggtacatcaaggcaggttggtccctggggcggcgtatgccttgtacggcgtatggccgctactcctgctcctgttggcgttgccaccacgggcatacgccatggaccgggagatggctgcatcgtgcggaggcgcggtttcataggtctggcactcttgaccttgtcaccacactataaagtgtttctcgcccggctcatatggtggttacaatatctcatcaccagagccgaggcgtgtttgcatgtgtggatccccccccttaacgttcgggggggcgcgatgccatcatcctcctcacgtgtatggtccacccagagctaatctttaccatcaccaagatcttgctcgccatactcggtccgctcatggtgctccaggctggtctaaccaaagtgccgtacttgtgcgtgctcaagggctcatccgtgtatgcatgttggtgcggaaagccgctgggggtcattacgtccaaatggctttcatgaggctggccgcgctgacgggtacgtacatctatgaccatcttaccccactgcgggactggcccacgcgggcctacgagaccttgcggtggcggttgagcccgtcgtcttttctgacatggagaccaagatcatcacctggggggcggacaccgcagcatgcggggacatcatctcaggcctgcccgttccgcccggagggggagagagatttttctgggaccggccgacggtcttgaagggcaggggtggcgactcctcgcgcctatcacggcctactcccaacagacacggggcctacttggttgtatcatcactagcctcacaggcgggacaagaaccaggtagagggggaggttcaagtggtttccactgcaacacaatctttcctggcgacctgcatcaacggcgtgtgttggactgtctaccatggtgccggctcaaagaccctagccggcctaagggcccaatcacccaaatgtacaccaatgtagaccaagacctcgttggctggcaagcgccctctggggcgcgctccttgacaccgtgcacctgcggcagctcggacctttacttggtcacgaggcatgctgatgtctaccggtgcgccggcggggcgacagcagggggagcttactctcccccaggcccgtctcctacttgaagggttcttcgggtggtccactgctttgcccctcggggcacgctgtaggcatcttccgggcgccgtgtgcacccggggggttgcgaaggcggtggacttcatacccgtcgaatctatggaaactaccatgcggtcgccggtcttcacggacaactcgtcccccccggccgtaccgcagacattccaagtggcccatctacaccccccactggcagcggcaagagcaccaaggtgccggctgcatatgcagcccaagggtacaaggtacttgtcctgaacccgtccgtcgccgccactttaggtttcggggcgtatatgtccaaggcacaggtgtcgaccctaacattagaactggggtaaggaccatcaccacgggcgcccctattacgtactccacctacggcaagttccttgccgacggtggttgttctggaggcgcctatgacatcataatatgtgatgaatgccaccaactgactcgaccagcatcttgggcatcggcacagtcctggaccaagcggagacggctggagcgcggcttgtcgtgctcgccaccgctacgcctccgggatcagtcaccgtgccacatcccaatatgaggaggtggctctgtccaacattggagagatccccttctacggcaaagccatccccatcgagaccatcaagggggggaggcatctcattttctgccattccaaaaagaaatgtgacgaactcgccgcaaagctgacgggcttggaatcaatgccgtagcatattacaggggcctcgatgtgtccgtcataccgaccagcggagacgtcgttgtcgtggcaacagacgctctaatgacgggctttactggcgattttgactcagtgatgactgtaatacatgtgtcacccagacagtcgatttcagcttggaccctaccttcaccattgagaccacgaccgtgccccaagacgcggtgtcgcgctcacagcggcgaggcaggactggtaggggcaggacaggcatctacggtttgtgactccaggagaacggccttcgggcatgttcgattcctcggtcctgtgtgagtgctatgacgcgggctgtgcttggtacgagctcacacccgccgagacctcagttaggctgcgggcttactaaacacaccagggttgcccgtttgccaggaccatctggagttctgggagagcgtcttcacaggcctcacccacatagatgcccacttcttgtcccagactaaacaggcaggagacaactttccctacctggtagcatacaggctacggtgtgcgccagggcccaggctccacctccatcgtgggatcaaatgtggaagtgcctcatacggctaaagcctacgctgcacgggccaacacccctgctgtataggctaggagccgtccaaacgaggtcaccctcacacaccccataaccaaatacatcatggcatgcatgtcggctga

SEQ ID NO: 619 - DNA, 4869 bp, Hepatitis C virus
ccgcccacaggacgtcaagttcccgggcggtggtcagatcgttggtggagtttacctgttgccgcgcaggggccccaggttgggtgtgcgcgcgactaggaagacttccgagcggtcgcaacctcgtgaaggcgacaacctatccccaaggctcgccagcccgagggtagggcctgggctcagcctgggtacccttggcccctctatggcaatgagggcttggggtgggcaggatggctcctgtcaccccgtggtctcggcctagttggggccccacggacccccggcgtaggtcgcgtaatttgggtaaggtcatcgatacccttgcatgcggcttcgccgacctcatggggtacattccgctcgtcggcgcccccttagggggcgctgccaggccctggcgcatggcgtccgggttctggaggacggcgtgaattatgcaacagggaatttgcccggttgctctttctctatcttccttttggctttgctgtcctgtttgaccatcccagtttccgcttagaggtgcgcaacgtgtccggggtgtatcatgtcacgaacgactgctccaacgcaagcattgtgtacgaggcaacggacgtgatcatgcatacccccgggtgcgtgccctgcgttcgggagggcaatacctcccgctgctggcggcgctcactcccacactcgcggccaggaattccagcgtcccgactacgacaatacgacggcacgtcgatttgctcgttggggcggctgctttctgttccgctatgtacgtgggggatctctgcggtctgtttttctcgtctcccagctgttcaccttctcgcctcgccggcatgagacggtacaggactgcaattgctcaatctatcccggccacgtatcaggtcaccgcatggcttgggatatgatgatgaactggtcacctacacagccctagtggtatcgcagctactccggatcccacaagctgtcgtggacatggtggcgggggcccactggggagtcctggcgggccttgcctactattccatggtggggaactgggctaaggtcttattgtgatgctactttttgccggcgtcgacgggagcacctacacgacagggggggcgctgggccgtaccacccacgggcttacgtccttcctttcaattgggccgtctcagaaaatccagcttataaataccaacggcagcggcacatcaacagaactgccttgaactgcaatgagtccctccacactggatggctcgccgcgttgttctacacaaacaagttcaacgcgtccggatgcccggagcgcatggccagctgccgccccatgacacgttcgatcaggggtggggtcccatcactcacgatgggcagggcagctcggaccagaggccctactgttggcactacgcaccccgaccgtgtggtattgtacccgcgtcggaggtgtgtggtccagtgtattgcttcccccgagccccgttgtggtggggacgaccgatcgttccggcgtccctacgtatagctggggggggaatgagacggacgtgctgctcctcaacaacacgcggccgccgcaaggcaactggttcggctgacatggatgaatagcactgggttcaccaaaacgtgcgggggccccccgtgtaacatcagggggagcggcaataacactttgacctgccccacggactgcttccggaagcaccccgaggccacttacaccaaatgcggttcgggccttggttgacacctaggtgcatggttgactacccatacaggctttggcactacccctgcactgtcaacttcaccatcttcaaggttaggatgtatgtggggggcgtggagcacaggctcaacgcgcgtgcaattggactcgaggagagcgttgtgatttggaggacagggatagatcagagcttagcccgctgctgctgtctacaacagagtggcagatactgccctgctccttcaccaccttaccggctctgtccactggtttgtccatctccatcagaacatcgtggacgtgcaatacctgtacggtatagggtcggcggttgtctcctttgcaatcaagtgggagtacatcgtgttgctcttccttctcctggcggacgcgcgcgtctggcctgcttgtggatgatgctactgatagctcaggccgaggctgccctagagaacctggtggttctcaatgcggcgtccgtggccggggcgcatggcctcctctcttttcttgtgttcttctgtgctgcctggtacatcaaggcaggttggtccctggggcggcgtatgccttgtacggcgtatggccgctactcctgctcctgttggcgttgccaccacgggcatacgccatggaccgggagatggctgcatcgtgcggaggcgcggtttcataggtctggcactcttgaccttgtcaccacactataaagtgtttctcgcccggctcatatggtggttacaatatctcatcaccagagccgaggcgtgtttgcatgtgtggatccccccccttaacgttcgggggggcgcgatgccatcatcctcctcacgtgtatggtccacccagagctaatctttaccatcaccaagatcttgctcgccatactcggtccgctcatggtgctccaggctggtctaaccaaagtgccgtacttgtgcgcgctcaagggctcatccgtgtatgcatgttggtgcggaaagccgctgggggtcattacgtccaaatggctttcatgaggctggccgcgctgacgggtacgtacatctatgaccatcttaccccactgcgggactggcccacgcgggcctacgagaccttgcggtggcggttgagcccgtcgtcttttctgacatggagaccaagatcatcacctggggggcggacaccgcagcatgcggggacatcatctcaggcctgcccgttccgcccggagggggagagagatttttctgggaccggccgacggtcttgaagggcaggggtggcgactcctcgcgcctatcacggcctactcccaacagacacggggcctacttggttgtatcatcactagcctcacaggcgggacaagaaccaggtagagggggaggttcaagtggtttccactgcaacacaatctttcctggcgacctgcatcaacggcgtgtgttggactgtctaccatggtgccggctcaaagaccctagccggcctaagggcccaatcacccaaatgtacaccaatgtagaccaagacctcgttggctggcaagcgccctctggggcgcgctccttgacaccgtgcacctgcggcagctcggacctttacttggtcacgaggcatgctgatgtctaccggtgcgccggcggggcgacagcagggggagcttactctcccccaggcccgtctcctacttgaagggttcttcgggtggtccactgctttgcccctcggggcacgctgtaggcatcttccgggcgccgtgtgcacccggggggttgcgaaggcggtggacttcatacccgtcgaatctatggaaactaccatgcggtcgccggtcttcacggacaactcgtcccccccggccgtaccgcagacattccaagtggcccatctacaccccccactggcagcggcaagagcaccaaggtgccggctgcatatgcagcccaagggtacaaggtacttgtcctgaacccgtccgtcgccgccactttaggtttcggggcgtatatgtccaaggcacaggtgtcgaccctaacattagaactggggtaaggaccatcaccacgggcgcccctattacgtactccacctacggcaagttccttgccgacggtggttgttctggaggcgcctatgacatcataatatgtgatgaatgccaccaactgactcgaccagcatcttgggcatcggcacagtcctggaccaagcggagacggctggagcgcggcttgtcgtgctcgccaccgctacgcctccgggatcagtcaccgtgccacatcccaatatgaggaggtggctctgtccaacattggagagatccccttctacggcaaagccatccccatcgagaccatcaagggggggaggcatctcattttctgccattccaaaaagaaatgtgacgaactcgccgcaaagctgacgggcttggaatcaatgccgtagcatattacaggggcctcgatgtgtccgtcataccgaccagcggagacgtcgttgtcgtggcaacagacgctctaatgacgggctttactggcgattttgactcagtgatgactgtaatacatgtgtcacccagacagtcgatttcagcttggaccctaccttcaccattgagaccacgaccgtgccccaagacgcggtgtcgcgctcacagcggcgaggcaggactggtaggggcaggacaggcatctacggtttgtgactccaggagaacggccttcgggcatgttcgattcctcggtcctgtgtgagtgctatgacgcgggctgtgcttggtacgagctcacacccgccgagacctcagttaggctgcgggcttactaaatacaccagggttgcccgtttgccaggaccatctggagttctgggagagcgtcttcacaggcctcacccacatagatgcccacttcttgtcccagactaaacaggcaggagacaactttccctacctggtagcatacaggctacggtgtgcgccagggcccaggctccacctccatcgtgggatcaaatgtggaagtgcctcatacggctaaagcctacgctgcacgggccaacacccctgctgtataggctaggagccgtccaaacgaggtcaccctcacacaccccataaccaaatacatcatggcatgcatgtcggctga

SEQ ID NO: 620 - DNA, 4869 bp, Hepatitis C virus
ccgcccacaggacgtcaagttcccgggcggtggtcagatcgttggtggagtttacctgttgccgcgcaggggccccaggttgggtgtgcgcgcgactaggaagacttccgagcggtcgcaacctcgtgaaggcgacaacctatccccaaggctcgccagcccgagggtagggcctgggctcagcctgggtacccttggcccctctatggcaatgagggcttggggtgggcaggatggctcctgtcaccccgtggtctcggcctagttggggccccacggacccccggcgtaggtcgcgtaatttgggtaaggtcatcgatacccttacatgcggcttcgccgacctcatggggtacattccgctcgtcggcgcccccttagggggcgctgccaggccctggcgcatggcgtccgggttctggaggacggcgtgaattatgcaacagggaatttgcccggttgctctttctctatcttccttttggctttgctgtcctgtttgaccatcccagtttccgcttagaggtgcgcaacgtgtccggggtgtatcatgtcacgaacgactgctccaacgcaagcattgtgtacgaggcaacggacgtgatcatgcatacccccgggtgcgtgccctgcgttcgggagggcaatacctcccgctgctggcggcgctcactcccacactcgcggccaggaattccagcgtcccgactacgacaatacgacggcacgtcgatttgctcgttggggcggctgctttctgttccgctatgtacgtgggggatctctgcggtctgtttttctcgtctcccagctgttcaccttctcgcctcgccggcatgagacggtacaggactgcaattgctcaatctatcccggccacgtatcaggtcaccgcatggcttgggatatgatgatgaactggtcacctacacagccctagtggtatcgcagctactccggatcccacaagctgtcgtggacatggtggcgggggcccactggggagtcctggcgggccttgcctactattccatggtggggaactgggctaaggtcttattgtgatgctactttttgccggcgtcgacgggagcacctacacgacagggggggcgctgggccgtaccacccacgggcttacgtccttcctttcaattgggccgtctcagaaaatccagcttataaataccaacggcagcggcacatcaacagaactgccttgaactgcaatgagtccctccacactggatggctcgccgcgttgttctacacaaacaagttcaacgcgtccggatgcccggagcgcatggccagctgccgccccatgacacgttcgatcaggggtggggtcccatcactcacgatgggcagggcagctcggaccagaggccctactgttggcactacgcaccccgaccgtgtggtattgtacccgcgtcggaggtgtgtggtccagtgtattgcttcccccgagccccgttgtggtggggacgaccgatcgttccggcgtccctacgtatagctggggggggaatgagacggacgtgctgctcctcaacaacacgcggccgccgcaaggcaactggttcggctgacatggatgaatagcactgggttcaccaaaacgtgcgggggccccccgtgtaacatcagggggagcggcaataacactttgacctgccccacggactgcttccggaagcaccccgaggccacttacaccaaatgcggttcgggccttggttgacacctaggtgcatggttgactacccatacaggctttggcactacccctgcactgtcaacttcaccatcttcaaggttaggatgtatgtggggggcgtggagcacaggctcaacgcgcgtgcaattggactcgaggagagcgttgtgatttggaggacagggatagatcagagcttagcccgctgctgctgtctacaacagagtggcagatactgccctgctccttcaccaccttaccggctctgtccactggtttgtccatctccatcagaacatcgtggacgtgcaatacctgtacggtatagggtcggcggttgtctcctttgcaatcaagtgggagtacatcgtgttgctcttccttctcctggcggacgcgcgcgtctggcctgcttgtggatgatgctactgatagctcaggccgaggctgccctagagaacctggtggttctcaatgcggcgtccgtggccggggcgcatggcctcctctcttttcttgtgttcttctgtgctgcctggtacatcaaggcaggttggtccctggggcggcgtatgccttgtacggcgtatggccgctactcctgctcctgttggcgttgccaccacgggcatacgccatggaccgggagatggctgcatcgtgcggaggcgcggtttcataggtctggcactcttgaccttgtcaccacactataaagtgtttctcgcccggctcatatggtggttacaatatctcatcaccagagccgaggcgtgtttgcatgtgtggatccccccccttaacgttcgggggggcgcgatgccatcatcctcctcacgtgtatggtccacccagagctaatctttaccatcaccaagatcttgctcgccatactcggtccgctcatggtgctccaggctggtctaaccaaagtgccgtacttgtgcgtgctcaagggctcatccgtgtatgcatgttggtgcggaaagccgctgggggtcattacgtccaaatggctttcatgaggctggccgcgctgacgggtacgtacatctatgaccatcttaccccactgcgggactggcccacgcgggcctacgagaccttgcggtggcggttgagcccgtcgtcttttctgacatggagaccaagatcatcacctggggggcggacaccgcagcatgcggggacatcatctcaggcctgcccgttccgcccggagggggagagagatttttctgggaccggccgacggtcttgaagggcaggggtggcgactcctcgcgcctatcacggcctactcccaacagacacggggcctacttggttgtatcatcactagcctcacaggcgggacaagaaccaggtagagggggaggttcaagtggtttccactgcaacacaatctttcctggcgacctgcatcaacggcgtgtgttggactgtctaccatggtgccggctcaaagaccctagccggcctaagggcccaatcacccaaatgtacaccaatgtagaccaagacctcgttggctggcaagcgccctctggggcgcgctccttgacaccgtgcacctgcggcagctcggacctttacttggtcacgaggcatgctgatgtctaccggtgcgccggcggggcgacagcagggggagcttactctcccccaggcccgtctcctacttgaagggttcttcgggtggtccactgctttgcccctcggggcacgctgtaggcatcttccgggcgccgtgtgcacccggggggttgcgaaggcggtggacttcatacccgtcgaatctatggaaactaccatgcggtcgccggtcttcacggacaactcgtcccccccggccgtaccgcagacattccaagtggcccatctacaccccccactggcagcggcaagagcaccaaggtgccggctgcatatgcagcccaagggtacaaggtacttgtcctgaacccgtccgtcgccgccactttaggtttcggggcgtatatgtccaaggcacaggtgtcgaccctaacattagaactggggtaaggaccatcaccacgggcgcccctattacgtactccacctacggcaagttccttgccggcggtggttgttctggaggcgcctatgacatcataatatgtgatgaatgccaccaactgactcgaccagcatcttgggcatcggcacagtcctggaccaagcggagacggctggagcgcggcttgtcgtgctcgccaccgctacgcctccgggatcagtcaccgtgccacatcccaatatgaggaggtggctctgtccaacattggagagatccccttctacggcaaagccatccccatcgagaccatcaagggggggaggcatctcattttctgccattccaaaaagaaatgtgacgaactcgccgcaaagctgacgggcttggaatcaatgccgtagcatattacaggggcctcgatgtgtccgtcataccgaccagcggagacgtcgttgtcgtggcaacagacgctctaatgacgggctttactggcgattttgactcagtgatgactgtaatacatgtgtcacccagacagtcgatttcagcttggaccctaccttcaccattgagaccacgaccgtgccccaagacgcggtgtcgcgctcacagcggcgaggcaggactggtaggggcaggacaggcatctacggtttgtgactccaggagaacggccttcgggcatgttcgattcctcggtcctgtgtgagtgctatgacgcgggctgtgcttggtacgagctcacacccgccgagacctcagttaggctgcgggcttactaaatacaccagggttgcccgtttgccaggaccatctggagttctgggagagcgtcttcacaggcctcacccacatagatgcccacttcttgtcccagactaaacaggcaggagacaactttccctacctggtagcatacaggctacggtgtgcgccagggcccaggctccacctccatcgtgggatcaaatgtggaagtgcctcatacggctaaagcctacgctgcacgggccaacacccctgctgtataggctaggagccgtccaaacgaggtcaccctcacacaccccataaccaaatacatcatggcatgcatgtcggctga

SEQ ID NO: 621 - DNA, 4869 bp, Hepatitis C virus
ccgcccacaggacgtcaagttcccgggcggtggtcagatcgttggtggagtttacctgttgccgcgcaggggccccaggttgggtgtgcgcgcgactaggaagacttccgagcggtcgcaacctcgtgaaggcgacaacctatccccaaggctcgccagcccgagggtagggcctgggctcagcctgggtacccttggcccctctatggcaatgagggcttggggtgggcaggatggctcctgtcaccccgtggtctcggcctagttggggccccacggacccccggcgtaggtcgcgtaatttgggtaaggtcatcgatacccttacatgcggcttcgccgacctcatggggtacattccgctcgtcggcgcccccttagggggcgctgccaggccctggcgcatggcgtccgggttctggaggacggcgtgaattatgcaacagggaatttgcccggttgctctttctctatcttccttttggctttgctgtcctgtttgaccatcccagtttccgcttagaggtgcgcaacgtgtccggggtgtatcatgtcacgaacgactgctccaacgcaagcattgtgtacgaggcaacggatgtgatcatgcatacccccgggtgcgtgccctgcgttcgggagggcaatacctcccgctgctggcggcgctcactcccacactcgcggccaggaattccagcgtcccgactacgacaatacgacggcacgtcgatttgctcgttggggcggctgctttctgttccgctatgtacgtgggggatctctgcggtctgtttttctcgtctcccagctgttcaccttctcgcctcgccggcatgagacggtacaggactgcaattgctcaatctatcccggccacgtatcaggtcaccgcatggcttgggatatgatgatgaactggtcacctacacagccctagtggtatcgcagctactccggatcccacaagctgtcgtggacatggtggcgggggcccactggggagtcctggcgggccttgcctactattccatggtggggaactgggctaaggtcttattgtgatgctactttttgccggcgtcgacgggagcacctacacgacagggggggcgctgggccgtaccacccacgggcttacgtccttcctttcaattgggccgtctcagaaaatccagcttataaataccaacggcagcggcacatcaacagaactgccttgaactgcaatgagtccctccacactggatggctcgccgcgttgttctacacaaacaagttcaacgcgtccggatgcccggagcgcatggccagctgccgccccatgacacgttcgatcaggggtggggtcccatcactcacgatgggcagggcagctcggaccagaggccctactgttggcactacgcaccccgaccgtgtggtattgtacccgcgtcggaggtgtgtggtccagtgtattgcttcccccgagccccgttgtggtggggacgaccgatcgttccggcgtccctacgtatagctggggggggaatgagacggacgtgctgctcctcaacaacacgcggccgccgcaaggcaactggttcggctgacatggatgaatagcactgggttcaccaaaacgtgcgggggccccccgtgtaacatcagggggagcggcaataacactttgacctgccccacggactgcttccggaagcaccccgaggccacttacaccaaatgcggttcgggccttggttgacacctaggtgcatggttgactacccatacaggctttggcactacccctgcactgtcaacttcaccatcttcaaggttaggatgtatgtggggggcgtggagcacaggctcaacgcgcgtgcaattggactcgaggagagcgttgtgatttggaggacagggatagatcagagcttagcccgctgctgctgtctacaacagagtggcagatactgccctgctccttcaccaccttaccggctctgtccactggtttgtccatctccatcagaacatcgtggacgtgcaatacctgtacggtatagggtcggcggttgtctcctttgcaatcaagtgggagtacatcgtgttgctcttccttctcctggcggacgcgcgcgtctggcctgcttgtggatgatgctactgatagctcaggccgaggctgccctagagaacctggtggttctcaatgcggcgtccgtggccggggcgcatggcctcctctcttttcttgtgttcttctgtgctgcctggtacatcaaggcaggttggtccctggggcggcgtatgccttgtacggcgtatggccgctactcctgctcctgttggcgttgccaccacgggcatacgccatggaccgggagatggctgcatcgtgcggaggcgcggtttcataggtctggcactcttgaccttgtcaccacactataaagtgtttctcgcccggctcatatggtggttacaatatctcatcaccagagccgaggcgtgtttgcatgtgtggatccccccccttaacgttcgggggggcgcgatgccatcatcctcctcacgtgtatggtccacccagagctaatctttaccatcaccaagatcttgctcgccatactcggtccgctcatggtgctccaggctggtctaaccaaagtgccgtacttgtgcgtgctcaagggctcatccgtgtatgcatgttggtgcggaaagccgctgggggtcattacgtccaaatggctttcatgaggctggccgcgctgacgggtacgtacatctatgaccatcttaccccactgcgggactggcccacgcgggcctacgagaccttgcggtggcggttgagcccgtcgtcttttctgacatggagaccaagatcatcacctggggggcggacaccgcagcatgcggggacatcatctcaggcctgcccgttccgcccggagggggagagagatttttctgggaccggccgacggtcttgaagggcaggggtggcgactcctcgcgcctatcacggcctactcccaacagacacggggcctacttggttgtatcatcactagcctcacaggcgggacaagaaccaggtagagggggaggttcaagtggtttccactgcaacacaatctttcctggcgacctgcatcaacggcgtgtgttggactgtctaccatggtgccggctcaaagaccctagccggcctaagggcccaatcacccaaatgtacaccaatgtagaccaagacctcgttggctggcaagcgccctctggggcgcgctccttgacaccgtgcacctgcggcagctcggacctttacttggtcacgaggcatgctgatgtctaccggtgcgccggcggggcgacagcagggggagcttactctcccccaggcccgtctcctacttgaagggttcttcgggtggtccactgctttgcccctcggggcacgctgtaggcatcttccgggcgccgtgtgcacccggggggttgcgaaggcggtggacttcatacccgtcgaatctatggaaactaccatgcggtcgccggtcttcacggacaactcgtcccccccggccgtaccgcagacattccaagtggcccatctacaccccccactggcagcggcaagagcaccaaggtgccggctgcatatgcagcccaagggtacaaggtacttgtcctgaacccgtccgtcgccgccactttaggtttcggggcgtatatgtccaaggcacaggtgtcgaccctaacattagaactggggtaaggaccatcaccacgggcgcccctattacgtactccacctacggcaagttccttgccgacggtggttgttctggaggcgcctatgacatcataatatgtgatgaatgccaccaactgactcgaccagcatcttgggcatcggcacagtcctggaccaagcggagacggctggagcgcggcttgtcgtgctcgccaccgctacgcctccgggatcagtcaccgtgccacatcccaatatgaggaggtggctctgtccaacattggagagatccccttctacggcaaagccatccccatcgagaccatcaagggggggaggcatctcattttctgccattccaaaaagaaatgtgacgaactcgccgcaaagctgacgggcttggaatcaatgccgtagcatattacaggggcctcgatgtgtccgtcataccgaccagcggagacgtcgttgtcgtggcaacagacgctctaatgacgggctttactggcgattttgactcagtgatgactgtaatacatgtgtcacccagacagtcgatttcagcttggaccctaccttcaccattgagaccacgaccgtgccccaagacgcggtgtcgcgctcacagcggcgaggcaggactggtaggggcaggacaggcatctacggtttgtgactccaggagaacggccttcgggcatgttcgattcctcggtcctgtgtgagtgctatgacgcgggctgtgcttggtacgagctcacacccgccgagacctcagttaggctgcgggcttactaaatacaccagggttgcccgtttgccaggaccatctggagttctgggagagcgtcttcacaggcctcacccacatagatgcccacttcttgtcccagactaaacaggcaggagacaactttccctacctggtagcatacaggctacggtgtgcgccagggcccaggctccacctccatcgtgggatcaaatgtggaagtgcctcatacggctaaagcctacgctgcacgggccaacacccctgctgtataggctaggagccgtccaaacgaggtcaccctcacacaccccataaccaaatacatcatggcatgcatgtcggctga

SEQ ID NO: 622 - DNA, 4869 bp, Hepatitis C virus
ccgcccacaggacgtcaagttcccgggcggtggtcagatcgttggtggagtttacctgttgccgcgcaggggccccaggttgggtgtgcgcgcgactaggaagacttccgagcggtcgcaacctcgtgaaggcgacaacctatccccaaggctcgccagcccgagggtagggcctgggctcagcctgggtacccttggcccctctatggcaatgagggcttggggtgggcaggatggctcctgtcaccccgtggtctcggcctagttggggccccacggacccccggcgtaggtcgcgtaatttgggtaaggtcatcgatacccttacatgcggcttcgccgacctcatggggtacattccgctcgtcggcgcccccttagggggcgctgccaggccctggcgcatggcgtccgggttctggaggacggcgtgaattatgcaacagggaatttgcccggttgctctttctctatcttccttttggctttgctgtcctgtttgaccatcccagtttccgcttagaggtgcgcaacgtgtccggggtgtatcatgtcacgaacgactgctccaacgcaagcattgtgtacgaggcaacggacgtgatcatgcatacccccgggtgcgtgccctgcgttcgggagggcaatacctcccgctgctggcggcgctcactcccacactcgcggccaggaattccagcgtcccgactacgacaatacgacggcacgtcgatttgctcgttggggcggctgctttctgttccgctatgtacgtgggggatctctgcggtctgtttttctcgtctcccagctgttcaccttctcgcctcgccggcatgagacggtacaggactgcaattgctcaatctatcccggccacgtatcaggtcaccgcatggcttgggatatgatgatgaactggtcacctacacagccctagtggtatcgcagctactccggatcccacaagctgtcgtggacatggtggcgggggcccactggggagtcctggcgggccttgcctactattccatggtggggaactgggctaaggtcttattgtgatgctactttttgccggcgtcgacgggagcacctacacgacagggggggcgctgggccgtaccacccacgggcttacgtccttcctttcaattgggccgtctcagaaaatccagcttataaataccaacggcagcggcacatcaacagaactgccttgaactgcaatgagtccctccacactggatggctcgccgcgttgttctacacaaacaagttcaacgcgtccggatgcccggagcgcatggccagctgccgccccatgacacgttcgatcaggggtggggtcccatcactcacgatgggcagggcagctcggaccagaggccctactgttggcactacgcaccccgaccgtgtggtattgtacccgcgtcggaggtgtgtggtccagtgtattgcttcccccgagccccgttgtggtggggacgaccgatcgttccggcgtccctacgtatagctggggggggaatgagacggacgtgctgctcctcaacaacacgcggccgccgcaaggcaactggttcggctgacatggatgaatagcactgggttcaccaaaacgtgcgggggccccccgtgtaacatcagggggagcggcaataacactttgacctgccccacggactgcttccggaagcaccccgaggccacttacaccaaatgcggttcgggccttggttgacacctaggtgcatggttgactacccatacaggctttggcactacccctgcactgtcaacttcaccatcttcaaggttaggatgtatgtggggggcgtggagcacaggctcaacgcgcgtgcaattggactcgaggagagcgttgtgatttggaggacagggatagatcagagcttagcccgctgctgctgtctacaacagagtggcagatactgccctgctccttcaccaccttaccggctctgtccactggtttgtccatctccatcagaacatcgtggacgtgcaatacctgtacggtatagggtcggcggttgtctcctttgcaatcaagtgggagtacatcgtgttgctcttccttctcctggcggacgcgcgcgtctggcctgcttgtggatgatgctactgatagctcaggccgaggctgccctagagaacctggtggttctcaatgcggcgtccgtggccggggcgcatggcctcctctcttttcttgtgttcttctgtgctgcctggtacatcaaggcaggttggtccctggggcggcgtatgccttgtacggcgtatggccgctactcctgctcctgttggcgttgccaccacgggcatacgccatggaccgggagatggctgcatcgtgcggaggcgcggtttcataggtctggcactcttgaccttgtcaccacactataaagtgtttctcgcccggctcatatggtggttacaatatctcatcaccagagccgaggcgtgtttgcatgtgtggatccccccccttaacgttcgggggggcgcgatgccatcatcctcctcacgtgtatggtccacccagagctaatctttaccatcaccaagatcttgctcgccatactcggtccgctcatggtgctccaggctggtctaaccaaagtgccgtacttgtgcgtgctcaagggctcatccgtgtatgcatgttggtgcggaaagccgctgggggtcattacgtccaaatggctttcatgaggctggccgcgctgacgggtacgtacatctatgaccatcttaccccactgcgggactggcccacgcgggcctacgagaccttgcggtggcggttgagcccgtcgtcttttctgacatggagaccaagatcatcacctggggggcggacaccgcagcatgcggggacatcatctcaggcctgcccgttccgcccggagggggagagagatttttctgggaccggccgacggtcttgaagggcaggggtggcgactcctcgcgcctatcacggcctactcccaacagacacggggcctacttggttgtatcatcactagcctcacaggcgggacaagaaccaggtagagggggaggttcaagtggtttccactgcaacacaatctttcctggcgacctgcatcaacggcgtgtgttggactgtctaccatggtgccggctcaaagaccctagccggcctaagggcccaatcacccaaatgtacaccaatgtagaccaagacctcgttggctggcaagcgccctctggggcgcgctccttgacaccgtgcacctgcggcagctcggacctttacttggtcacgaggcatgctgatgtctaccggtgcgccggcggggcgacagcagggggagcttactctcccccaggcccgtctcctacttgaagggttcttcgggtggtccactgctttgcccctcggggcacgctgtaggcatcttccgggcgccgtgtgcacccggggggttgcgaaggcggtggacttcatacccgtcgaatctatggaaactaccatgcggtcgccggtcttcacggacaactcgtcccccccggccgtaccgcagacattccaagtggcccatctacaccccccactggcagcggcaagagcaccaaggtgccggctgcatatgcagcccaagggtacaaggtacttgtcctgaacccgtccgtcgccgccactttaggtttcggggcgtatatgtccaaggcacaggtgtcgaccctaacattagaactggggtaaggaccatcaccacgggcgcccctattacgtactccacctacggcaagttccttgccgacggtggttgttctggaggcgcctatgacatcataatatgtgatgaatgccaccaactgactcgaccagcatcttgggcatcggcacagtcctggaccaagcggagacggctggagcgcggcttgtcgtgctcgccaccgctacgcctccgggatcagtcaccgtgccacatcccaatatgaggaggtggctctgtccaacattggagagatccccttctacggcaaagccatccccatcgagaccatcaagggggggaggcatctcattttctgccattccaaaaagaaatgtgacgaactcgccgcaaagctgacgggcttggaatcaatgccgtagcatattacaggggcctcgatgtgtccgtcataccgaccagcggagacgtcgttgtcgtggcaacagacgctctaatgacgggctttactggcgattttgactcagtgatgactgtaatacatgtgtcacccagacagtcgatttcagcttggaccctaccttcaccattgagaccacgaccgtgccccaagacgcggtgtcgcgctcacagcggcgaggcaggactggtaggggcaggacaggcatctacggtttgtgactccaggagaacggccttcgggcatgttcgattcctcggtcctgtgtgagtgctatgacgcgggctgtgcttggtacgagctcacacccgccgagacctcagttaggctgcgggcttactaaatacaccagggttgcccgtttgccaggaccatctggagttctgggagagcgtcttcacaggcctcacccacatagatgcccacttcttgtcccagactaaacaggcaggagacaactttccctacctggtagcatacaggctacggtgtgcgccagggcccaggctccacctccatcgtgggatcaaatgtggaagtgcctcatacggctaaagcctacgctgcacgggccaacacccctgctgtataggctaggagccgtccaaacgaggtcaccctcacacaccccataaccaaatacatcatggcatgcatgtcggctga

SEQ ID NO: 623 - DNA, 4869 bp, Hepatitis C virus; identical to SEQ ID NO: 622

SEQ ID NO: 624 - DNA, 4869 bp, Hepatitis C virus; identical to SEQ ID NO: 622

SEQ ID NO: 625 - DNA, 4869 bp, Hepatitis C virus; identical to SEQ ID NO: 622

SEQ ID NO: 626 - DNA, 4869 bp, Hepatitis C virus; identical to SEQ ID NO: 622

SEQ ID NO: 627 - DNA, 4869 bp, Hepatitis C virus; identical to SEQ ID NO: 622

SEQ ID NO: 628 - DNA, 4869 bp, Hepatitis C virus
ccgcccacaggacgtcaagttcccgggcggtggtcagatcgttggtggagtttacctgttgccgcgcaggggccccaggttgggtgtgcgcgcgactaggaagacttccgagcggtcgcaacctcgtgaaggcgacaacctatccccaaggctcgccagcccgagggtagggcctgggctcagcctgggtacccttggcccctctatggcaatgagggcttggggtgggcaggatggctcctgtcaccccgtggtctcggcctagttggggccccacggacccccggcgtaggtcgcgtaatttgggtaaggtcatcgatacccttacatgcggcttcgccgacctcatggggtacattccgctcgtcggcgcccccttagggggcgctgccaggccctggcgcatggcgtccgggttctggaggacggcgtgaattatgcaacagggaatttgcccggttgctctttctctatcttccttttggctttgctgtcctgtttgaccatcccagtttccgcttagaggtgcgcaacgtgtccggggtgtatcatgtcacgaacgactgctccaacgcaagcattgtgtacgaggcaacggacgtgatcatgcatacccccgggtgcgtgccctgcgttcgggagggcaatacctcccgctgctggcggcgctcactcccacactcgcggccaggaattccagcgtcccgactacgacaatacgacggcacgtcgatttgctcgttggggcggctgctttctgttccgctatgtacgtgggggatctctgcggtctgtttttctcgtctcccagctgttcaccttctcgcctcgccggcatgagacggtacaggactgcaattgctcaatctatcccggccacgtatcaggtcaccgcatggcttgggatatgatgatgaactggtcacctacacagccctagtggtatcgcagctactccggatcccacaagctgtcgtggacatggtggcgggggcccactggggagtcctggcgggccttgcctactattccatggtggggaactgggctaaggtcttattgtgatgctactttttgccggcgtcgacgggagcacctacacgacagggggggcgctgggccgtaccacccacgggcttacgtccttcctttcaattgggccgtctcagaaaatccagcttataaataccaacggcagcggcacatcaacagaactgccttgaactgcaatgagtccctccacactggatggctcgccgcgttgttctacacaaacaagttcaacgcgtccggatgcccggagcgcatggccagctgccgccccatgacacgttcgatcaggggtggggtcccatcactcacgatgggcagggcagctcggaccagaggccctactgttggcactacgcaccccgaccgtgtggtattgtacccgcgtcggaggtgtgtggtccagtgtattgcttcccccgagccccgttgtggtggggacgaccgatcgttccggcgtccctacgtatagctggggggggaatgagacggacgtgctgctcctcaacaacacgcggccgccgcaaggcaactggttcggctgacatggatgaatagcactgggttcaccaaaacgtgcgggggccccccgtgtaacatcagggggagcggcaataacactttgacctgccccacggactgcttccggaagcaccccgaggccacttacaccaaatgcggttcgggccttggttgacacctaggtgcatggttgactacccatacaggctttggcactacccctgcactgtcaacttcaccatcttcaaggttaggatgtatgtggggggcgtggagcacaggctcaacgcgcgtgcaattggactcgaggagagcgttgtgatttggaggacagggatagatcagagcttagcccgctgctgctgtctacaacagagtggcagatactgccctgctccttcaccaccttaccggctctgtccactggtttgtccatctccatcagaacatcgtggacgtgcaatacctgtacggtatagggtcggcggttgtctcctttgcaatcaagtgggagtacatcgtgttgctcttccttctcctggcggacgcgcgcgtctggcctgcttgtggatgatgctactgatagctcaggccgaggctgccctagagaacctggtggttctcaatgcggcgtccgtggccggggcgcatggcctcctctcttttcttgtgttcttctgtgctgcctggtacatcaaggcaggttggtccctggggcggcgtatgccttgtacggcgtatggccgctactcctgctcctgttggcgttgccaccacgggcatacgccatggaccgggagatggctgcatcgtgcggaggcgcggtttcataggtctggcactcttgaccttgtcaccacactataaagtgtttctcgcccggctcatatggtggttacaatatctcatcaccagagccgaggcgtgtttgcatgtgtggatccccccccttaacgttcgggggggcgcgatgccatcatcctcctcacgtgtatggtccacccagagctaatctttaccatcaccaagatcttgctcgccatactcggtccgctcatggtgctccaggctggtctaaccaaagtgccgtacttgtgcgtgctcaagggctcatccgtgtatgcatgttggtgcggaaagccgctgggggtcattacgtccaaatggctttcatgaggctggccgcgctgacgggtacgtacatctatgaccatcttaccccactgcgggactggcccacgcgggcctacgagaccttgcggtggcggttgagcccgtcgtcttttctgacatggagaccaagatcatcacctggggggcggacaccgcagcatgcggggacatcatctcaggcctgcccgttccgcccggagggggagagagatttttctgggaccggccgacggtcttgaagggcaggggtggcgactcctcgcgcctatcacggcctactcccaacagacacggggcctacttggttgtatcatcactagcctcacaggcgggacaagaaccaggtagagggggaggttcaagtggtttccactgcaacacaatctttcctggcgacctgcatcaacggcgtgtgttggactgtctaccatggtgccggctcaaagaccctagccggcctaagggcccaatcacccaaatgtacaccaatgtagaccaagacctcgttggctggcaagcgccctctggggcgcgctccttgacaccgtgcacctgcggcagctcggacctttacttggtcacgaggcatgctgatgtctaccggtgcgccggcggggcgacagcagggggagcttactctcccccaggcccgtctcctacttgaagggttcttcgggtggtccactgctttgcccctcggggcacgctgtaggcatcttccgggcgccgtgtgcacccggggggttgcgaaggcggtggacttcatacccgtcgaatctatggaaactaccatgcggtcgccggtcttcacggacaactcgtcccccccggccgtaccgcagacattccaagtggcccatctacaccccccactggcagcggcaagagcaccaaggtgccggctgcatatgcagcccaagggtacaaggtacttgtcctgaacccgtccgtcgccgccactttaggtttcggggcgtatatgtccaaggcacaggtgtcgaccctaacattagaactggggtaaggaccatcaccacgggcgcccctattacgtactccacctacggcaagttccttgccgacggtggttgttctggaggcgcctatgacatcataatatgtgatgaatgccaccaactgactcgaccagcatcttgggcatcggcacagtcctggaccaagcggagacggctggagcgcggcttgtcgtgctcgccaccgctacgcctccgggatcagtcaccgtgccacatcccaatatgaggaggtggctctgtccaacattggagagatccccttctacggcaaagccatccccatcgagaccatcaagggggggaggcatctcattttctgccattccaaaaagaaatgtgacgaactcgccgcaaagctgacgggcttggaatcaatgccgtagcatattacaggggcctcgatgtgtccgtcataccgaccagcggagacgtcgttgtcgtggcaacagacgctctaatgacgggctttactggcgattttgactcagtgatgactgtaatacatgtgtcacccagacagtcgatttcagcttggaccctaccttcaccattgagaccacgaccgtgccccaagacgcggtgtcgcgctcacagcggcgaggcaggactggtaggggcaggacaggcatctacggtttgtgactccaggagaacggccttcgggcatgttcgattcctcggtcctgtgtgagtgctatgacgcgggctgtgcttggtacgagctcacacccgccgagacctcagttaggctgcgggcttactaaatacaccagggttgcccgtttgccaggaccatctggagttctgggagagcgtcttcacaggcctcacccacatagatgcccacttcttgtcccagactaaacaggcaggagacaactttccctacctggtagcatacaggctacggtgtgcgccagggcccaggctccacctccatcgtgggatcaaatgtggaagtgcctcatacggctaaagcctgcgctgcacgggccaacacccctgctgtataggctaggagccgtccaaacgaggtcaccctcacacaccccataaccaaatacatcatggcatgcatgtcggctga

SEQ ID NO: 629 - DNA, 4869 bp, Hepatitis C virus
ccgcccacaggacgtcaagttcccgggcggtggtcagatcgttggtggagtttacctgttgccgcgcaggggccccaggttgggtgtgcgcgcgactaggaagacttccgagcggtcgcaacctcgtgaaggcgacaacctatccccaaggctcgccagcccgagggtagggcctgggctcagcctgggtacccttggcccctctatggcaatgagggcttggggtgggcaggatggctcctgtcaccccgtggtctcggcctagttggggccccacggacccccggcgtaggtcgcgtaatttgggtaaggtcatcgatacccttacatgcggcttcgccgacctcatggggtacattccgctcgtcggcgcccccttagggggcgctgccaggccctggcgcatggcgtccgggttctggaggacggcgtgaattatgcaacagggaatttgcccggttgctctttctctatcttccttttggctttgctgtcctgtttgaccatcccagtttccgcttagaggtgcgcaacgtgtccggggtgtatcatgtcacgaacgactgctccaacgcaagcattgtgtacgaggcaacggacgtgatcatgcatacccccgggtgcgtgccctgcgttcgggagggcaatacctcccgctgctggcggcgctcactcccacattcgcggccaggaattccagcgtcccgactacgacaatacgacggcacgtcgatttgctcgttggggcggctgctttctgttccgctatgtacgtgggggatctctgcggtctgtttttctcgtctcccagctgttcaccttctcgcctcgccggcatgagacggtacaggactgcaattgctcaatctatcccggccacgtatcaggtcaccgcatggcttgggatatgatgatgaactggtcacctacacagccctagtggtatcgcagctactccggatcccacaagctgtcgtggacatggtggcgggggcccactggggagtcctggcgggccttgcctactattccatggtggggaactgggctaaggtcttattgtgatgctactttttgccggcgtcgacgggagcacctacacgacagggggggcgctgggccgtaccacccacgggcttacgtccttcctttcaattgggccgtctcagaaaatccagcttataaataccaacggcagcggcacatcaacagaactgccttgaactgcaatgagtccctccacactggatggctcgccgcgttgttctacacaaacaagttcaacgcgtccggatgcccggagcgcatggccagctgccgccccatgacacgttcgatcaggggtggggtcccatcactcacgatgggcagggcagctcggaccagaggccctactgttggcactacgcaccccgaccgtgtggtattgtacccgcgtcggaggtgtgtggtccagtgtattgcttcccccgagccccgttgtggtggggacgaccgatcgttccggcgtccctacgtatagctggggggggaatgagacggacgtgctgctcctcaacaacacgcggccgccgcaaggcaactggttcggctgacatggatgaatagcactgggttcaccaaaacgtgcgggggccccccgtgtaacatcagggggagcggcaataacactttgacctgccccacggactgcttccggaagcaccccgaggccacttacaccaaatgcggttcgggccttggttgacacctaggtgcatggttgactacccatacaggctttggcactacccctgcactgtcaacttcaccatcttcaaggttaggatgtatgtggggggcgtggagcacaggctcaacgcgcgtgcaattggactcgaggagagcgttgtgatttggaggacagggatagatcagagcttagcccgctgctgctgtctacaacagagtggcagatactgccctgctccttcaccaccttaccggctctgtccactggtttgtccatctccatcagaacatcgtggacgtgcaatacctgtacggtatagggtcggcggttgtctcctttgcaatcaagtgggagtacatcgtgttgctcttccttctcctggcggacgcgcgcgtctggcctgcttgtggatgatgctactgatagctcaggccgaggctgccctagagaacctggtggttctcaatgcggcgtccgtggccggggcgcatggcctcctctcttttcttgtgttcttctgtgctgcctggtacatcaaggcaggttggtccctggggcggcgtatgccttgtacggcgtatggccgctactcctgctcctgttggcgttgccaccacgggcatacgccatggaccgggagatggctgcatcgtgcggaggcgcggtttcataggtctggcactcttgaccttgtcaccacactataaagtgtttctcgcccggctcatatggtggttacaatatctcatcaccagagccgaggcgtgtttgcatgtgtggatccccccccttaacgttcgggggggcgcgatgccatcatcctcctcacgtgtatggtccacccagagctaatctttaccatcaccaagatcttgctcgccatactcggtccgctcatggtgctccaggctggtctaaccaaagtgccgtacttgtgcgtgctcaagggctcatccgtgtatgcatgttggtgcggaaagccgctgggggtcattacgtccaaatggctttcatgaggctggccgcgctgacgggtacgtacatctatgaccatcttaccccactgcgggactggcccacgcgggcctacgagaccttgcggtggcggttgagcccgtcgtcttttctgacatggagaccaagatcatcacctggggggcggacaccgcagcatgcggggacatcatctcaggcctgcccgttccgcccggagggggagagagatttttctgggaccggccgacggtcttgaagggcaggggtggcgactcctcgcgcctatcacggcctactcccaacagacacggggcctacttggttgtatcatcactagcctcacaggcgggacaagaaccaggtagagggggaggttcaagtggtttccactgcaacacaatctttcctggcgacctgcatcaacggcgtgtgttggactgtctaccatggtgccggctcaaagaccctagccggcctaagggcccaatcacccaaatgtacaccaatgtagaccaagacctcgttggctggcaagcgccctctggggcgcgctccttgacaccgtgcacctgcggcagctcggacctttacttggtcacgaggcatgctgatgtctaccggtgcgccggcggggcgacagcagggggagcttactctcccccaggcccgtctcctacttgaagggttcttcgggtggtccactgctttgcccctcggggcacgctgtaggcatcttccgggcgccgtgtgcacccggggggttgcgaaggcggtggacttcatacccgtcgaatctatggaaactaccatgcggtcgccggtcttcacggacaactcgtcccccccggccgtaccgcagacattccaagtggcccatctacaccccccactggcagcggcaagagcaccaaggtgccggctgcatatgcagcccaagggtacaaggtacttgtcctgaacccgtccgtcgccgccactttaggtttcggggcgtatatgtccaaggcacaggtgtcgaccctaacattagaactggggtaaggaccatcaccacgggcgcccctattacgtactccacctacggcaagttccttgccgacggtggttgttctggaggcgcctatgacatcataatatgtgatgaatgccaccaactgactcgaccagcatcttgggcatcggcacagtcctggaccaagcggagacggctggagcgcggcttgtcgtgctcgccaccgctacgcctccgggatcagtcaccgtgccacatcccaatatgaggaggtggctctgtccaacattggagagatccccttctacggcaaagccatccccatcgagaccatcaagggggggaggcatctcattttctgccattccaaaaagaaatgtgacgaactcgccgcaaagctgacgggcttggaatcaatgccgtagcatattacaggggcctcgatgtgtccgtcataccgaccagcggagacgtcgttgtcgtggcaacagacgctctaatgacgggctttactggcgattttgactcagtgatgactgtaatacatgtgtcacccagacagtcgatttcagcttggaccctaccttcaccattgagaccacgaccgtgccccaagacgcggtgtcgcgctcacagcggcgaggcaggactggtaggggcaggacaggcatctacggtttgtgactccaggagaacggccttcgggcatgttcgattcctcggtcctgtgtgagtgctatgacgcgggctgtgcttggtacgagctcacacccgccgagacctcagttaggctgcgggcttactaaatacaccagggttgcccgtttgccaggaccatctggagttctgggagagcgtcttcacaggcctcacccacatagatgcccacttcttgtcccagactaaacaggcaggagacaactttccctacctggtagcatacaggctacggtgtgcgccagggcccaggctccacctccatcgtgggatcaaatgtggaagtgcctcatacggctaaagcctacgctgcacgggccaacacccctgctgtataggctaggagccgtccaaacgaggtcaccctcacacaccccataaccaaatacatcatggcatgcatgtcggctga

SEQ ID NO: 630 - DNA, 4869 bp, Hepatitis C virus
ccgcccacaggacgtcaagttcccgggcggtggtcagatcgttggtggagtttacctgttgccgcgcaggggccccaggttgggtgtgcgcgcgactaggaagacttccgagcggtcgcaacctcgtgaaggcgacaacctatccccaaggctcgccagcccgagggtagggcctgggctcagcctgggtacccttggcccctctatggcaatgagggcttggggtgggcaggatggctcctgtcaccccgtggtctcggcctagttggggccccacggacccccggcgtaggtcgcgtaatttgggtaaggtcatcgatacccttacatgcggcttcgccgacctcatggggtacattccgctcgtcggcgcccccttagggggcgctgccaggccctggcgcatggcgtccgggttctggaggacggcgtgaattatgcaacagggaatttgcccggttgctctttctctatcttccttttggctttgctgtcctgtttgaccatcccagtttccgcttagaggtgcgcaacgtgtccggggtgtatcatgtcacgaacgactgctccaacgcaagcattgtgtacgaggcaacggacgtgatcatgcatacccccgggtgcgtgccctgcgttcgggagggcaatacctcccgctgctggcggcgctcactcccacactcgcggccaggaattccagcgtcccgactacgacaatacgacggcacgtcgatttgctcgttggggcggctgctttctgttccgctatgtacgtgggggatctctgcggtctgtttttctcgtctcccagctgttcaccttctcgcctcgccggcatgagacggtacaggactgcaattgctcaatctatcccggccacgtatcaggtcaccgcatggcttgggatatgatgatgaactggtcacctacacagccctagtggtatcgcagctactccggatcccacaagctgtcgtggacatggtggcgggggcccactggggagtcctggcgggccttgcctactattccatggtggggaactgggctaaggtcttattgtgatgctactttttgccggcgtcgacgggagcacctacacgacagggggggcgctgggccgtaccacccacgggcttacgtccttcctttcaattgggccgtctcagaaaatccagcttataaataccaacggcagcggcacatcaacagaactgccttgaactgcaatgagtccctccacactggatggctcgccgcgttgttctacacaaacaagttcaacgcgtccggatgcccggagcgcatggccagctgccgccccatgacacgttcgatcaggggtggggtcccatcactcacgatgggcagggcagctcggaccagaggccctactgttggcactacgcaccccgaccgtgtggtattgtacccgcgtcggaggtgtgtggtccagtgtattgcttcccccgagccccgttgtggtggggacgaccgatcgttccggcgtccctacgtatagctggggggggaatgagacggacgtgctgctcctcaacaacacgcggccgccgcaaggcaactggttcggctgacatggatgaatagcactgggttcaccaaaacgtgcgggggccccccgtgtaacatcagggggagcggcaataacactttgacctgccccacggactgcttccggaagcaccccgaggccacttacaccaaatgcggttcgggccttggttgacacctagatgcatggttgactacccatacaggctttggcactacccctgcactgtcaacttcaccatcttcaaggttaggatgtatgtggggggcgtggagcacaggctcaacgcgcgtgcaattggactcgaggagagcgttgtgatttggaggacagggatagatcagagcttagcccgctgctgctgtctacaacagagtggcagatactgccctgctccttcaccaccttaccggctctgtccactggtttgtccatctccatcagaacatcgtggacgtgcaatacctgtacggtatagggtcggcggttgtctcctttgcaatcaagtgggagtacatcgtgttgctcttccttctcctggcggacgcgcgcgtctggcctgcttgtggatgatgctactgatagctcaggccgaggctgccctagagaacctggtggttctcaatgcggcgtccgtggccggggcgcatggcctcctctcttttcttgtgttcttctgtgctgcctggtacatcaaggcaggttggtccctggggcggcgtataccttgtacggcgtatggccgctactcctgctcctgttggcgttgccaccacgggcatacgccatggaccgggagatggctgcatcgtgcggaggcgcggtttcataggtctggcactcttgaccttgtcaccacactataaagtgtttctcgcccggctcatatggtggttacaatatctcatcaccagagccgaggcgtgtttgcatgtgtggatccccccccttaacgttcgggggggcgcgatgccatcatcctcctcacgtgtatggtccacccagagctaatctttaccatcaccaagatcttgctcgccatactcggtccgctcatggtgctccaggctggtctaaccaaagtgccgtacttgtgcgtgctcaagggctcatccgtgtatgcatgttggtgcggaaagccgctgggggtcattacgtccaaatggctttcatgaggctggccgcgctgacgggtacgtacatctatgaccatcttaccccactgcgggactggcccacgcgggcctacgagaccttgcggtggcggttgagcccgtcgtcttttctgacatggagaccaagatcatcacctggggggcggacaccgcagcatgcggggacatcatctcaggcctgcccgttccgcccggagggggagagagatttttctgggaccggccgacggtcttgaagggcaggggtggcgactcctcgcgcctatcacggcctactcccaacagacacggggcctacttggttgtatcatcactagcctcacaggcgggacaagaaccaggtagagggggaggttcaagtggtttccactgcaacacaatctttcctggcgacctgcatcaacggcgtgtgttggactgtctaccatggtgccggctcaaagaccctagccggcctaagggcccaatcacccaaatgtacaccaatgtagaccaagacctcgttggctggcaagcgccctctggggcgcgctccttgacaccgtgcacctgcggcagctcggacctttacttggtcacgaggcatgctgatgtctaccggtgcgccggcggggcgacagcagggggagcttactctcccccaggcccgtctcctacttgaagggttcttcgggtggtccactgctttgcccctcggggcacgctgtaggcatcttccgggcgccgtgtgcacccggggggttgcgaaggcggtggacttcatacccgtcgaatctatggaaactaccatgcggtcgccggtcttcacggacaactcgtcccccccggccgtaccgcagacattccaagtggcccatctacaccccccactggcagcggcaagagcaccaaggtgccggctgcatatgcagcccaagggtacaaggtacttgtcctgaacccgtccgtcgccgccactttaggtttcggggcgtatatgtccaaggcacaggtgtcgaccctaacattagaactggggtaaggaccatcaccacgggcgcccctattacgtactccacctacggcaagttccttgccgacggtggttgttctggaggcgcctatgacatcataatatgtgatgaatgccaccaactgactcgaccagcatcttgggcatcggcacagtcctggaccaagcggagacggctggagcgcggcttgtcgtgctcgccaccgctacgcctccgggatcagtcaccgtgccacatcccaatatgaggaggtggctctgtccaacattggagagatccccttctacggcaaagccatccccatcgagaccatcaagggggggaggcatctcattttctgccattccaaaaagaaatgtgacgaactcgccgcaaagctgacgggcttggaatcaatgccgtagcatattacaggggcctcgatgtgtccgtcataccgaccagcggagacgtcgttgtcgtggcaacagacgctctaatgacgggctttactggcgattttgactcagtgatgactgtaatacatgtgtcacccagacagtcgatttcagcttggaccctaccttcaccattgagaccacgaccgtgccccaagacgcggtgtcgcgctcacagcggcgaggcaggactggtaggggcaggacaggcatctacggtttgtgactccaggagaacggccttcgggcatgttcgattcctcggtcctgtgtgagtgctatgacgcgggctgtgcttggtacgagctcacacccgccgagacctcagttaggctgcgggcttactaaatacaccagggttgcccgtttgccaggaccatctggagttctgggagagcgtcttcacaggcctcacccacatagatgcccacttcttgtcccagactaaacaggcaggagacaactttccctacctggtagcatacaggctacggtgtgcgccagggcccaggctccacctccatcgtgggatcaaatgtggaagtgcctcatacggctaaagcctacgctgcacgggccaacacccctgctgtataggctaggagccgtccaaacgaggtcaccctcacacaccccataaccaaatacatcatggcatgcatgtcggctga

SEQ ID NO: 631 - DNA, 4869 bp, Hepatitis C virus
ccgcccacaggacgtcaagttcccgggcggtggtcagatcgttggtggagtttacctgttgccgcgcaggggccccaggttgggtgtgcgcgcgactaggaagacttccgagcggtcgcaacctcgtgaaggcgacaacctatccccaaggctcgccagcccgagggtagggcctgggctcagcctgggtacccttggcccctctatggcaatgagggcttggggtgggcaggatggctcctgtcaccccgtggtctcggcctagttggggccccacggacccccggcgtaggtcgcgtaatttgggtaaggtcatcgatacccttacatgcggcttcgccgacctcatggggtacattccgctcgtcggcgcccccttagggggcgctgccaggccctggcgcatggcgtccgggttctggaggacggcgtgaattatgcaacagggaatttgcccggttgctctttctctatcttccttttggctttgctgtcctgtttgaccatcccagtttccgcttagaggtgcgcaacgtgtccggggtgtatcatgtcacgaacgactgctccaacgcaagcattgtgtacgaggcaacggacgtgatcatgcatacccccgggtgcgtgccctgcgttcgggagggcaatacctcccgctgctggcggcgctcactcccacactcgcggccaggaattccagcgtcccgactacgacaatacgacggcacgtcgatttgctcgttggggcggctgctttctgttccgctatgtacgtgggggatctctgcggtctgtttttctcgtctcccagctgttcaccttctcgcctcgccggcatgagacggtacaggactgcaattgctcaatctatcccggccacgtatcaggtcaccgcatggcttgggatatgatgatgaactggtcacctacacagccctagtggtatcgcagctactccggatcccacaagctgtcgtggacatggtggcgggggcccactggggagtcctggcgggccttgcctactattccatggtggggaactgggctaaggtcttattgtgatgctactttttgccggcgtcgacgggagcacctacacgacagggggggcgctgggccgtaccacccacgggcttacgtccttcctttcaattgggccgtctcagaaaatccagcttataaataccaacggcagcggcacatcaacagaactgccttgaactgcaatgagtccctccacactggatggctcgccgcgttgttctacacaaacaagttcaacgcgtccggatgcccggagcgcatggccagctgccgccccatgacacgttcgatcaggggtggggtcccatcactcacgatgggcagggcagctcggaccagaggccctactgttggcactacgcaccccgaccgtgtggtattgtacccgcgtcggaggtgtgtggtccagtgtattgcttcccccgagccccgttgtggtggggacgaccgatcgttccggcgtccctacgtatagctggggggggaatgagacggacgtgctgctcctcaacaacacgcggccgccgcaaggcaactggttcggctgacatggatgaatagcactgggttcaccaaaacgtgcgggggccccccgtgtaacatcagggggagcggcaataacactttgacctgccccacggactgcttccggaagcaccccgaggccacttacaccaaatgcggttcgggccttggttgacacctaggtgcatggttgactacccatacaggctttggcactacccctgcactgtcaacttcaccatcttcaaggttaggatgtatgtggggggcgtggagcacaggctcaacgcgcgtgcaattggactcgaggagagcgttgtgatttggaggacagggatagatcagagcttagcccgctgctgctgtctacaacagagtggcagatactgccctgctccttcaccaccttaccggctctgtccactggtttgtccatctccatcagaacatcgtggacgtgcaatacctgtacggtatagggtcggcggttgtctcctttgcaatcaagtgggagtacatcgtgttgctcttccttctcctggcggacgcgcgcgtctggcctgcttgtggatgatgctactgatagctcaggccgaggctgccctagagaacctggtggttctcaatgcggcgtccgtggccggggcgcatggcctcctctcttttcttgtgttcttctgtgctgcctggtacatcaaggcaggttggtccctggggcggcgtatgccttgtacggcgtatggccgctactcctgctcctgttggcgttgccaccacgggcatacgccatggaccgggagatggctgcatcgtgcggaggcgcggtttcataggtctggcactcttgaccttgtcaccacactataaagtgtttctcgcccggctcatatggtggttacaatatctcatcaccagagccgaggcgtgtttgcatgtgtggatccccccccttaacgttcgggggggcgcgatgccatcatcctcctcacgtgtatggtccacccagagctaatctttaccatcaccaagatcttgctcgccatactcggtccgctcatggtgctccaggctggtctaaccaaagtgccgtacttgtgcgtgctcaagggctcatccgtgtatgcatgttggtgcggaaagccgctgggggtcattacgtccaaatggctttcatgaggctggccgcgctgacgggtacgtacatctatgaccatcttaccccactgcgggactggcccacgcgggcctacgagaccttgcggtggcggttgagcccgtcgtcttttctgacatggagaccaagatcatcacctggggggcggacaccgcagcatgcggggacatcatctcaggcctgcccgttccgcccggagggggagagagatttttctgggaccggccgacggtcttgaagggcaggggtggcgactcctcgcgcctatcacggcctactcccaacagacacggggcctacttggttgtatcatcactagcctcacaggcgggacaagaaccaggtagagggggaggttcaagtggtttccactgcaacacaatctttcctggcgacctgcatcaacggcgtgtgttggactgtctaccatggtgccggctcaaagaccctagccggcctaagggcccaatcacccaaatgtacaccaatgtagaccaagacctcgttggctggcaagcgccctctggggcgcgctccttgacaccgtgcacctgcggcagctcggacctttacttggtcacgaggcatgctgatgtctaccggtgcgccggcggggcgacagcagggggagcttactctcccccaggcccgtctcctacttgaagggttcttcgggtggtccactgctttgcccctcggggcacgctgtaggcatcttccgggcgccgtgtgcacccggggggttgcgaaggcggtggacttcatacccgtcgaatctatggaaactaccatgcggtcgccggtcttcacggacaactcgtcccccccggccgtaccgcagacattccaagtggcccatctacaccccccactggcagcggcaagagcaccaaggtgccggctgcatatgcagcccaagggtacaaggtacttgtcctgaacccgtccgtcgccgccactttaggtttcggggcgtatatgtccaaggcacaggtgtcgaccctaacattagaactggggtaaggaccatcaccacgggcgcccctattacgtactccacctacggcaagttccttgccgacggtggttgttctggaggcgcctatgacatcataatatgtgatgaatgccaccaactgactcgaccagcatcttgggcatcggcacagtcctggaccaagcggagacggctggagcgcggcttgtcgtgctcgccaccgctacgcctccgggatcagtcaccgtgccacatcccaatatgaggaggtggctctgtccaacattggagagatccccttctacggcaaagccatccccatcgagaccatcaagggggggaggcatctcattttctgccattccaaaaagaaatgtgacgaactcgccgcaaagctgacgggcttggaatcaatgccgtagcatattacaggggcctcgatgtgtccgtcataccgaccagcggagacgtcgttgtcgtggcaacagacgctctaatgacgggctttactggcgattttgactcagtgatgactgtaatacatgtgtcacccagacagtcgatttcagcttggaccctaccttcaccattgagaccacgaccgtgccccaagacgcggtgtcgcgctcacagcggcgaggcaggactggtaggggcaggacaggcatctacggtttgtgactccaggagaacggccttcgggcatgttcgattcctcggtcctgtgtgagtgctatgacgcgggctgtgcttggtacgagctcacacccgccgagacctcagttaggctgcgggcttactaaatacaccagggttgcccatttgccaggaccatctggagttctgggagagcgtcttcacaggcctcacccacatagatgcccacttcttgtcccagactaaacaggcaggagacaactttccctacctggtagcatacaggctacggtgtgcgccagggcccaggctccacctccatcgtgggatcaaatgtggaagtgcctcatacggctaaagcctacgctgcacgggccaacacccctgctgtataggctaggagccgtccaaacgaggtcaccctcacacaccccataaccaaatacatcatggcatgcatgtcggctga

SEQ ID NO: 632 - DNA, 4869 bp, Hepatitis C virus; identical to SEQ ID NO: 622

SEQ ID NO: 633 - DNA, 4869 bp, Hepatitis C virus; identical to SEQ ID NO: 622

SEQ ID NO: 634 - DNA, 4869 bp, Hepatitis C virus; identical to SEQ ID NO: 622

SEQ ID NO: 635 - DNA, 4869 bp, Hepatitis C virus; identical to SEQ ID NO: 622

SEQ ID NO: 636 - DNA, 4869 bp, Hepatitis C virus; identical to SEQ ID NO: 622

SEQ ID NO: 637 - DNA, 4869 bp, Hepatitis C virus; identical to SEQ ID NO: 622

SEQ ID NO: 638 - DNA, 4874 bp, Hepatitis C virus
acaccaaccgtcgcccacaggacgtcaagttcccgggtggcggccagatcgttggtggagtttacttgttgccgcgcaggggccctagattgggtgtgcgcgcgacgaggaagacttccgagcggtccaacctcgaggtagacgtcagcctatccccaaggcgcgtcggcccgagggcaggacctgggcccagcccgggtacccttggcccctctatggcaatgagggctgcggatgggcgggatggctcctgtcccccgtggctctcggcctagctggggccccacagacccccggcgtaggtcgcgcaatttgggtaaggtcatcgataccctcacgtgcggcttcgccgacctcatggggtacattccgctcgtcggcgcccctctcggagggctgccagggccctggcgcatggcgtccgggttctggaagacggcgtgaactatgcaacagggaaccttcctggttgctctttctctatcttccttctggccctgctctcttgcctgactgtgcccgatcagcctatcaagtacgcaactcttcgggcctctaccatgtcaccaatgattgccctaactcgagtattgtgtacgagacggccgataccatcctacactctccggggtgcgtcccttgcgttcgcgagggtaacgcctcaaatgttgggtggctgtggcccccacggtcgccaccagggacggcaagctccccgcaacgcagcttcgacgtcacatcgatctgcttgtcgggggcgccaccctctgctcggccctctacgtgggggcttgtgcgggtccatctttcttgtcggccaactgttcactttctcccccaggcgccactggacaacgcaagactgcaactgttctatctaccccggccacataacgggtcaccgcatggcatgggatatgatgatgaactgtcccctacaacagcgctggtagtagcccagctgctcagggttccacaagccatcttggatatgatcgctggtgctcactggggtgtcctagcgggcatagcgtatttttccatggtggggaactggggaaggttctggtggtgctgctgctgtttgccggcgtcgacgcgggaacctacaccaccgggggagctgctgccaggaccgcgtccacgttcgccggccttttcgatacgggcgccaagcagaatatccagctgatcaacacaacggcagttggcacatcaatcgcacggccttgaattgtaatgcgagcctcgacactggctgggtagcggggctcttctattaccaaaaattcaactcctcaggctgccccgagaggatggccagcttaagcccctcgccgatttcgaccaaggctggggccctatcagctacgccaacggaagcggccccgaacaccgcccctactgctggcactaccccccaaagccttgtggtgtcgtgccagcgcagaaagtatgtggcccagttattgcttcactcctagccccgtggtggtgggaacaaccgacaagcggggtgcgcctacctacaactggggtagcaatgacacggacgtcctcgtccttaataacaccaggccaccgctgggcaattgttcggttgcacctggatgaactcatccggatttaccaaagtgtgtggagcgcctccttgtgtcatcggaggagtgggcaacaacaccttgcactgccccactgactgtttccgcaagcatccagaggccacatactctcgtgtggctccggtccctggatcacgcccaggtgcatggtccactatccttacaggctttggcattatccttgcaccgtcaactacaccgtgttcaaagtcaggatgtacgtgggaggggtcgagcacagctggaagttgcttgcaactggacgcggggcgagcgttgtgatctggacgacagggacaggtccgagctcagcccgctgctgctgtccaccacacagtggcaggtccttccatgctccttcacgaccttgccagccttgacaccggcctcatccacctccaccagaacatcgtggacgtgcaatatttgtacggggtggggtcaagcatcgtgtcctgggccatcaagtgggagtatgtcatcctcttgtttctcctgcttgcagatggcgcatctgctcctgcttgtgggtgatgctactcatatcccaggcggaagcagctttggagaacctcgtggtgctcaatgcggcgtctctggccgggacgcatggtctcgtgtccttcctcgtgttcttctgctttgcatgtacctgaggggtaagtgggtgcccggagcggcctacgccttctacgggatgtggcccctcctcctgctcctgttggcgttgccccagcgggcatacgcgctagacacggagacgaccgcgtcgtgtgcggcattgttcttgtcgggttaatggcgctgactctgtcaccgcattacaagcgctatgtcagctggtgcttatggtggcttcagtatttcctgaccagagtagaagcgcaactgcacgtgtgggtcccccccctcaacgtcggggggggcgtgacgctgtcatcttactcacgtgtgtcgtacacccggccttggtatttgacatcaccaagctgctgctggccgtcttcggacccctttggattcttcaaaccagcctgctcaaaggccctacttcgtgcgcgtccaaggccttctccggatctgcgcgctagtgcgcgagatggccggaggccattacgtgcagatggccatcatcaagatgggggcgcttactggcacctatgtttataaccatctcacccctctcgggactgggcgcacaacggcctacgagatctggccgtggctgtggagccagtcgtcttttcccagatggagaccaagctcattacgtggggggcagacaccgccgcatgtggtgacatcatcaacgcttgcccgtctccgcccgtaggggccgagagatattgctcggaccggccgacgggatggtctctaaagggtggaggttgctggcgcctatcacggcgtacgcccagcagacaaggggcctcttggggtgcataattaccagctgaccggccgggacaaaaaccaggtggagggtgaggtccagattgtgtcaactgctgcccagaccttcctggcaacctgcatcaacggggtgtgctggactgtctaccacggagccggaacgaggacatcgcgtcacccaggggtcctgttatccagatgtacaccaatgtagaccaagacttagtaggctggcccgctccccaaggtgcccgctcattgacaccctgcacttgcggctcctcggacctttacctggtcacgaggcagccgatgtcattcccgtgcgccggcggggtgacagcagaggcagtctgctttcgccccggcccatctcttacttaaaaggctcctcggggggcccactgctgtgccccgcgggacacgccgtaggcaattcagagccgcggtgtgcacccgtggagtggctaaggcggtggacttcatccccgtagagaacctagagacaaccacgaggtccccggtgttcacagacaactcctctccaccagcagtgccccagagcttccaggtggccacctgcatgctcccaccggcagcggtaagagcaccaaggtcccggccgcatatgctgctcagggctacaaggtgctggtgctcaacccttccgttgcagcaacattgggctttggtgcttatatgtcaaggcccatgggattgatcctaacatcaggactggggtgaggacaattaccactggcagccccatcacgtactccacctatggcaagtttcttgccgacggcgggtgctcggggggtgcttatgacataataatttgtgagagtgccactccacggatgcaacatccatcttgggcatcggcaccgtccttgaccaagcagagactgcgggggcaagactggttgtgcttgccaccgccacccctccaggctccgtcaccgtgcccctcataacatcgaggaggttgcgctgtccaccaccggagagatccccttctatggcaaggctattccccttgagacaatcaagggggggagacatctcatcttctgccattcaaagaagaagtgcgacgagctcgccgcgaactggccgcgttgggcgttaatgccgtggcttactaccgcggccttgacgtgtccgtcatcccgaccagtggcgatgttgtcgtcgtggcaactgatgcactcatgaccggctataccggcgacttcgctcggtgatagactgcaatacgtgtgtcacccagacagtcgacttcagccttgaccctaccttcaccattgagacaaccacgcttccccaggatgctgtctcccgcactcaacgtcggggcaggactggcagggggaagccggcatctacagatttgtggcaccgggggagcgcccttccggcatgttcgactcgtccgtcctctgtgagtgctatgacgcgggctgtgcttggtatgagctcacacccgctgagaccacagttaggcacgagcgtacatgaacaccccgggactccctgtgtgccaagaccatcttgagttttgggaaggcgtcttcacgggtctcacccatatagacgcccacttcttgtcccagacaaagcagagtggagaaaactttccttacctgttgcgtaccaagccaccgtgtgcgctagagcccaagcccctcccccatcgtgggaccagatgtggaagtgtttgatccgtctcaagcccacccttcatgggccaacacctctgctatacagactggcgctgttcagaatgaaatcaccctgacgcacccggtcaccaagtatatcatgacatgcatgtcg

SEQ ID NO: 639 - DNA, 4874 bp, Hepatitis C virus
acaccaaccgtcgcccacaggacgtcaagttcccgggtggcggccagatcgttggtggagtttacttgttgccgcgcaggggccctagattgggtgtgcgcgcgacgaggaagacttccgagcggtccaacctcgaggtagacgtcagcctatccccaaggcgcgtcggcccgagggcaggacctgggcccagcccgggtacccttggcccctctatggcaatgagggctgcggatgggcgggatggctcctgtcccccgtggctctcggcctagctggggccccacagacccccggcgtaggtcgcgcaatttgggtaaggtcatcgataccctcacgtgcggcttcgccgacctcatggggtacattccgctcgtcggcgcccctctcggagggctgccagggccctggcgcatggcgtccgggttctggaagacggcgtgaattatgcaacagggaaccttcctggttgctctttctctatcttccttctggccctgctctcttgcctgactgtgcccgatcagcctatcaagtacgcaactcttcgggcctctaccatgtcaccaatgattgccctaactcgagtattgtgtacgagacggccgataccatcctacactctccggggtgtgtcccttgcgttcgcgagggtaacgcctcaaatgttgggtggctgtggcccccacggtcgccaccagggacggcaagctccccgcaacgcagcttcgacgtcacatcgatctgcttgtcgggggcgccaccctctgctcggccctctacgtgggggcttgtgcgggtccatctttcttgtcggccaactgttcactttctcccccaggcgccactggacaacgcaagactgcaactgttctatctaccccggccacataacgggtcaccgcatggcatgggatatgatgatgaactgtcccctacaacagcgctggtagtagcccagctgctcagggttccacaagccatcttggatatgatcgctggtgctcactggggtgtcctagcgggcatagcgtatttttccatggtggggaactggggaaggttctggtggtgctgctgctgtttgccggcgtcgatgcggcaacctacaccactgggggagctgctgccaggaccgcgtccacgttcgccggccttttcgatacgggcgccaagcagaatatccagctgatcaacacaacggcagttggcacatcaatcgcacggccttgaattgtaatgcgagcctcgacactggctgggtagcggggctcttctattaccaaaaattcaactcctcaggctgccccgagaggatggccagctcaagcccctcgccgatttcgaccaaggctggggccctatcagctacgccaacggaagcggccccgaacaccgcccctactgctggcactaccccccaaagccttgtggtatcgtgccagcgcagaacgtatgtggcccagttattgcttcactcctagccccgtggtggtgggaacaaccgacaagcggggtgcgcctacctacaactggggtagcaatgacacggacgtcctcgtccttaataacaccaggccaccgctgggcaattgttcggttgcacctggatgaactcatctggatttaccaaagtgtgtggagcgcctccttgtgtcatcggaggagcgggcaacaacaccttgcactgccccactgactgtttccgcaagcatccagaggccacatactctcgtgtggctccggtccctggatcacgcccaggtgcatggtccactatccttacaggctttggcattatccttgcaccgtcaactacaccgtgttcaaagtcaggatgtacgtgggaggggtcgagcacagctggaagttgcttgcaactggacgcggggcgagcgttgtgatctggacgacagggacaggtccgagctcagcccgctgctgctgtccaccacacagtggcaggtccttccatgctccttcacgaccttgccagccttgacaccggcctcatccacctccaccagaacatcgtggacgtgcaatatttgtacggggtggggtcaagcatcgtgtcctgggccatcaagtgggagtatgtcatcctcttgtttctcctgcttgcagatggcgcatctgctcctgcttgtggatgatgctactcatatcccaggcggaagcagctttggagaacctcgtggtgctcaatgcggcgtctctggccgggacgcatggtcttgtgtccttcctcgtgttcttctgctttgcatgtacctgaggggtaagtgggtgcccggagcggcctacgccttctacgggatgtggcctctcctcctgctcctgttggcgttgccccagcgggcatacgcgctagacacggagacgaccgcgtcgtgtgcggcattgttcttgtcgggttaatggcgctgactctgtcaccgcattacaagcgctatgtcagctggtgcttatggtggcttcagtatttcctgaccagagtagaagcgcaactgcacgtgtgggtcccccccctcaacgtcggggggggcgtgacgctgtcatcttactcacgtgtgtcgtacacccggccttggtatttgacatcaccaagctgctgctggccgtcttcggacccctttggattcttcaaaccagcctgctcaaaggccctacttcgtgcgcgtccaaggccttctccggatctgcgcgctagtgcgcgagatggccggaggccattacgtgcagatggccatcatcaagatgggggcgcttactggcacctatgtttataaccatctcacccctctcgggactgggcgcacaacggcctacgagatctggccgtggctgtggagccagtcgtcttttcccagatggagaccaagctcattacgtggggggcagacaccgccgcatgtggtgacatcatcaacgcttgcccgtctccgcccgtaggggccgagagatattgctcggaccggccgacgggatggtctctaaagggtggaggttgctggcgcctatcacggcgtacgcccagcagacaaggggcctcttggggtgcataattaccagctgaccggccgggacaaaaaccaggtggagggtgaggtccagattgtgtcaactgctgcccagaccttcctggcaacctgcatcaacggggtgtgctggactgtctaccacggagccggaacaaggacatcgcgtcacccaggggtcctgttatccagatgtacaccaatgtagaccaagacttagtaggctggcccgctccccaaggtgcccgctcattgacaccctgcacttgcggctcctcggacctttacctggtcacgaggcagccgatgtcattcccgtgcgccggcggggtgacagcagaggcagtctgctttcgcctcggcccatctcttacttaaaaggctcctcggggggcccactgctgtgccccgcgggacacgccgtaggcaattcagagccgcggtgtgcacccgtggagtggctaaggcggtggacttcatccccgtagagaacctagagacaaccatgaggtccccggtgttcacagacaactcctctccaccagcagtgccccagagcttccaggtggccacctgcatgctcccaccggcagcggtaagagcaccaaggtcccggccgcatatgctgctgagggctacacggtgctggtgctcaacccttccgttgcagcaacattgggctttggtgcttatatgtcaaggcccatgggattgatcctaacatcaggactggggtgaggacaattactactggcagccccatcacgtactccacctatggcaagtttcttgccgacggcgggtgctcggggggtgcttatgacataataatttgtgagagtgccactccacggatgcaacatccatcttgggcatcggcaccgtccttgaccaagcagagactgcgggggcaagactggttgtgcttgccaccgccacccctccgggctccgtcaccgtgcccctcataacatcgaggaggttgctctgtccaccaccggagagatccccttctatggcaaggctattccccttgagacaatcaagggggggagacatctcatcttctgccattcaaagaagaagtgcgacgagctcgccgcgaactggccgcgttgggcgttaatgccgtggcttactaccgcggccttgacgtgtccgtcatcccgaccagtggcgatgttgtcgtcgtggcaactgatgcactcatgaccggctataccggcgacttcgctcggtgatagactgcaatacgtgtgtcacccagacagtcgacttcagccttgaccctaccttcaccattgagacaaccacgcttccccaggatgctgtctcccgcactcaacgtcggggcaggactggcagggggaagccggcatctacagatttgtggcaccgggggagcgcccttccggcatgttcgactcgtccgtcctctgtgagtgctatgacgcgggctgtgcttggtatgagctcacacccgctgagaccacagttaggcacgagcgtacatgaacaccccgggactccctgtgtgccaagaccatcttgagttttgggaaggcgtcttcacgggtctcacccatatagacgcccacttcttatcccagacaaagcagagtggagaaaactttccttacctgtagcgtaccaagccaccgtgtgcgctagagcccaagcccctcccccatcgtgggaccagatgtggaagtgtttgatccgtctcaagcccacccttcatgggccaacacctctgctatacagactggcgctgttcagaatgaaatcaccctgacgcacccggtcaccaagtatatcatgacatgcatgtcg

SEQ ID NO: 640 - DNA, 4874 bp, Hepatitis C virus
acaccaaccgtcgcccacaggacgtcaagttcccgggtggcggccagatcgttggtggagtttacttgttgccgcgcaggggccctagattgggtgtgcgcgcgacgaggaagacttccgagcggtccaacctcgaggtagacgtcagcctatccccaaggcgcgtcggcccgagggcaggacctgggcccagcccgggtacccttggcccctctatggcaatgagggctgcggatgggcgggatggctcctgtcccccgtggctctcggcctagctggggccccacagacccccggcgtaggtcgcgcaatttgggtaaggtcatcgataccctcacgtgcggcttcgccgacctcatggggtacattccgctcgtcggcgcccctctcggagggctgccagggccctggcgcatggcgtccgggttctggaagacggcgtgaactatgcaacagggaaccttcctggttgctctttctctatcttccttctggccctgctctcttgcctgactgtgcccgatcagcctatcaagtacgcaactcttcgggcctctaccatgtcaccaatgattgccctaactcgagtattgtgtacgagacggccgataccatcctacactctccggggtgtgtcccttgcgttcgcgagggtaacgcctcaaatgttgggtggctgtggcccccacggtcgccaccagggacggcaagctccccgcaacgcagcttcgacgtcacatcgatctgcttgtcgggggcgccaccctctgctcggccctctacgtgggggcttgtgcgggtccatctttcttgtcggccaactgttcactttctcccccaggcgccactggacaacgcaagactgcaactgttctatctaccccggccacataacgggtcaccgcatggcatgggatatgatgatgaactgtcccctacaacagcgctggtagtagcccagctgctcagggttccacaagccatcttggatatgatcgctggtgctcactggggtgtcctagcgggcatagcgtatttttccatggtggggaactggggaaggttctggtggtgctgctgctgtttgccggcgtcgatgcggcaacctacaccactgggggagctgctgccaggaccgcgtccacgttcgccggccttttcgatacgggcgccaagcagaatatccagctgatcaacacaacggcagttggcacatcaatcgcacggccttgaattgtaatgcgagcctcgacactggctgggtagcggggctcttctattaccaaaaattcaactcctcaggctgccccgagaggatggccagctcaagcccctcgccgatttcgaccaaggctggggccctatcagctacgccaacggaagcggccccgaacaccgcccctactgctggcactaccccccaaagccttgtggtatcgtgccagcgcagaacgtatgtggcccagttattgcttcactcctagccccgtggtggtgggaacaaccgacaagcggggtgcgcctacctacaactggggtagcaatgacacggacgtcctcgtccttaataacaccaggccaccgctgggcaattgttcggttgcacctggatgaactcatctggatttaccaaagtgtgtggagcgcctccttgtgtcatcggaggagcgggcaacaacaccttgcactgccccactgactgtttccgcaagcatccagaggccacatactctcgtgtggctccggtccctggatcacgcccaggtgcatggtccactatccttacaggctttggcattatccttgcaccgtcaactacaccgtgttcaaagtcaggatgtacgtgggaggggtcgagcacagctggaagttgcttgcaactggacgcggggcgagcgttgtgatctggacgacagggacaggtccgagctcagcccgctgctgctgtccaccacacagtggcaggtccttccatgctccttcacgaccttgccagccttgacaccggcctcatccacctccaccagaacatcgtggacgtgcaatatttgtacggggtggggtcaagcatcgtgtcctgggccatcaagtgggagtatgtcatcctcttgtttctcctgcttgcagatggcgcatctgctcctgcttgtggatgatgctactcatatcccaggcggaagcagctttggagaacctcgtggtgctcaatgcggcgtctctggccgggacgcatggtcttgtgtccttcctcgtgttcttctgctttgcatgtacctgaggggtaagtgggtgcccggagcggcctacgccttctacgggatgtggcctctcctcctgctcctgttggcgttgccccagcgggcatacgcgctagacacggagacgaccgcgtcgtgtgcggcattgttcttgtcgggttaatggcgctgactctgtcaccgcattacaagcgctatgtcagctggtgcttatggtggcttcagtatttcctgaccagagtagaagcgcaactgcacgtgtgggtcccccccctcaacgtcggggggggcgtgacgctgtcatcttactcacgtgtgtcgtacacccggccttggtatttgacatcaccaagctgctgctggccgtcttcggacccctttggattcttcaaaccagcctgctcaaaggccctacttcgtgcgcgtccaaggccttctccggatctgcgcgctagtgcgcgagatggccggaggccattacgtgcagatggccatcatcaagatgggggcgcttactggcacctatgtttataaccatctcacccctctcgggactgggcgcacaacggcctacgagatctggccgtggctgtggagccagtcgtcttttcccagatggagaccaagctcattacgtggggggcagacaccgccgcatgtggtgacatcatcaacgcttgcccgtctccgcccgtaggggccgagagatattgctcggaccggccgacgggatggtctctaaagggtggaggttgctggcgcctatcacggcgtacgcccagcagacaaggggcctcttggggtgcataattaccagctgaccggccgggacaaaaaccaggtggagggtgaggtccagattgtgtcaactgctgcccagaccttcctggcaacctgcatcaacggggtgtgctggactgtctaccacggagccggaacaaggacatcgcgtcacccaggggtcctgttatccagatgtacaccaatgtagaccaagacttagtaggctggcccgctccccaaggtgcccgctcattgacaccctgcacttgcggctcctcggacctttacctggtcacgaggcagccgatgtcattcccgtgcgccggcggggtgacagcagaggcagtctgctttcgcctcggcccatctcttacttaaaaggctcctcggggggcccactgctgtgccccgcgggacacgccgtaggcaattcagagccgcggtgtgcacccgtggagtggctaaggcggtggacttcatccccgtagagaacctagagacaaccacgaggtccccggtgttcacagacaactcctctccaccagcagtgccccagagcttccaggtggccacctgcatgctcccaccggcagcggtaagagcaccaaggtcccggccgcatatgctgctcagggctacaaggtgctggtgctcaacccttccgttgcagcaacattgggctttggtgcttatatgtcaaggcccatgggattgatcctaacatcaggactggggtgaggacaattactactggcagccccatcacgtactccacctatggcaagtttcttgccgacggcgggtgctcggggggtgcttatgacataataatttgtgagagtgccactccacggatgcaacatccatcttgggcatcggcaccgtccttgaccaagcagagactgcgggggcaagactggttgtgcttgccaccgccacccctccgggctccgtcaccgtgcccctcataacatcgaggaggttgctctgtccaccaccggagagatccccttctatggcaaggctattccccttgagacaatcaagggggggagacatctcatcttctgccattcaaagaagaagtgcgacgagctcgccgcgaactggccgcgttgggcgttaatgccgtggcttactaccgcggccttgacgtgtccgtcatcccgaccagtggcgatgttgtcgtcgtggcaactgatgcactcatgaccggctataccggcgacttcgctcggtgatagactgcaatacgtgtgtcacccagacagtcgacttcagccttgaccctaccttcaccattgagacaaccacgcttccccaggatgctgtctcccgcactcaacgtcggggcaggactggcagggggaagccggcatctacagatttgtggcaccgggggagcgcccttccggcatgttcgactcgtccgtcctctgtgagtgctatgacgcgggctgtgcttggtatgagctcacacccgctgagaccacagttaggcacgagcgtacatgaacaccccgggactccctgtgtgccaagaccatcttgagttttgggaaggcgtcttcacgggtctcacccatatagacgcccacttcttatcccagacaaagcagagtggagaaaactttccttacctgtagcgtaccaagccaccgtgtgcgctagagcccaagcccctcccccatcgtgggaccagatgtggaagtgtttgatccgtctcaagcccacccttcatgggccaacacctctgctatacagactggcgctgttcagaatgaaatcaccctgacgcacccggtcaccaagtatatcatgacatgcatgtcg

SEQ ID NO: 641 - DNA, 4874 bp, Hepatitis C virus
acaccaaccgtcgcccacaggacgtcaagttcccgggtggcggccagatcgttggtggagtttacttgttgccgcgcaggggccctagattgggtgtgcgcgcgacgaggaagacttccgagcggtccaacctcgaggtagacgtcagcctatccccaaggcgcgtcggcccgagggcaggacctgggcccagcccgggtacccttggcccctctatggcaatgagggctgcggatgggcgggatggctcctgtcccccgtggctctcggcctagctggggccccacagacccccggcgtaggtcgcgcaatttgggtaaggtcatcgataccctcacgtgcggcttcgccgacctcatggggtacattccgctcgtcggcgcccctctcggagggctgccagggccctggcgcatggcgtccgggttctggaagacggcgtgaactatgcaacagggaaccttcctggttgctctttctctatcttccttctggccctgctctcttgcctgactgtgcccgatcagcctatcaagtacgcaactcttcgggcctctaccatgtcaccaatgattgccctaactcgagtattgtgtacgagacggccgataccatcctacactctccggggtgtgtcccttgcgttcgcgagggtaacgcctcaaatgttgggtggctgtggcccccacggtcgccaccagggacggcaagctccccgcaacgcagcttcgacgtcacatcgatctgcttgtcgggggcgccaccctctgctcggccctctacgtgggggcttgtgcgggtccatctttcttgtcggccaactgttcacgttctcccccaggcgccactggacaacgcaagactgcaactgttctatctaccccggccacataacgggtcatcgcatggcatgggatatgatgatgaactgtcccctacaacagcgctggtagtagcccagctgctcagggttccacaagccatcttggatatgatcgctggtgctcactggggtgtcctagcgggcatagcgtatttttccatggtggggaactggggaaggttctggtggtgctgctgctgtttgccggcgtcgatgcggcaacctacaccaccgggggagctgctgccaggaccgcgtccacgttcgccggccttttcgatacgggcgccaagcagaatatccagctgatcaacacaacggcagttggcacatcaatcgcacggccttgaattgtaatgcgagcctcgacactggctgggtagcggggctcttctattaccaaaaattcaactcctcaggctgccccgagaggatggccagcttaagcccctcgccgatttcgaccaaggctggggccctatcagctacgccaacggaagcggccccgaacaccgcccctactgctggcactaccccccaaagccttgtggtatcgtgccagcgcagaacgtatgtggcccagttattgcttcactcctagccccgtggtggtgggaacaaccgacaagcggggtgcgcctacctacaactggggtggcaatgacacggacgtcctcgtccttaataacaccaggccaccgctgggcaattgttcggttgcacctggatggactcatctggatttaccaaagtgtgcggagcgcctccttgtgtcatcggaggagtgggcaacaacaccttgcactgccccactgactgtttccgcaagcatccagaggccacatactctcgtgtggctccggtccctggatcacgcccaggtgcatggtccactatccttacaggctttggcattatccttgcaccgtcaactacaccgtgttcaaagtcaggatgtacgtgggaggggtcgagcacagctggaagttgcttgcaactggacgcggggcgagcgttgtgatctggacgacagggacaggtccgagctcagcccgctactgctgtccaccacacagtggcaggtccttccatgctccttcacgaccttgccagccttgacaccggcctcatccacctccaccagaacatcgtggacgtgcaatatttgtacggggtggggtcaagcatcgtgtcctgggccatcaagtgggagtatgtcatcctcttgtttctcctgcttgcagatggcgcatctgctcctgcttgtggatgatgctactcatatcccaggcggaagcagctttggagaacctcgtggtgctcaatgcggcgtctctggccgggacgcatggtcttgtgtccttcctcgtgttcttctgctttgcatgtacctgaggggtaagtgggtgcccggagcggcctacgccttctacgggatgtggcctctcctcctgctcctgttggcgttgccccagcgggcatacgcgctagacacggagacgaccgcgtcgtgtgcggcattgttcttgtcgggttaatggcgctgactctgtcaccgcattacaagcgctatgtcagctggtgcttatggtggcttcagtatttcctgaccagagtagaagcgcaactgcacgtgtgggtcccccccctcaacgtcggggggggcgtgacgctgtcatcttactcacgtgtgtcgtacacccggccttggtatttgacatcaccaagctgctgctggccgtcttcggacccctttggattcttcaaaccagcctgctcaaaggccctacttcgtgcgcgtccaaggccttctccggatctgcgcgctagtgcgcgagatggccggaggccattacgtgcagatggccatcatcaagatgggggcgcttactggcacctatgtttataaccatctcacccctctcgggactgggcgcacaacggcctacgagatctggccgtggctgtggagccagtcgtcttttcccagatggagaccaagctcattacgtggggggcggacaccgccgcatgtggtgacatcatcaacgcttgcccgtctccgcccgtaggggccgagagatattgctcggaccggccgacgggatggtctctaaagggtggaggttgctggcgcctatcacggcgtacgcccagcagacaaggggcctcttggggtgcataattaccagctgaccggccgggacaaaaaccaggtggagggtgaggtccagattgtgtcaactgctgcccagaccttcctggcaacctgcatcaacggggtgtgctggactgtctaccacggagccggaacaaggacatcgcgtcacccaggggtcctgttatccagatgtacaccaatgtagaccaagacttagtaggctggcccgctccccaaggtgcccgctcattgacaccctgcacttgcggctcctcggacctttacctggtcacgaggcagccgatgtcattcccgtgcgccggcggggtgacagcagaggcagtctgctttcgccccggcccatctcttacttaaaaggctcctcggggggcccactgctgtgccccgcgggacacgccgtaggcaattcagagccgcggtgtgcacccgtggagtggctaaggcggtggacttcatccccgtagagaacctagagacaaccatgaggtccccggtgttcacagacaactcctctccaccagcagtgccccagagcttccaggtggccacctgcatgctcccaccggcagcggtaagagcaccaaggtcccggccgcatatgctgctcagggctacaaggtgctggtgctcaacccttccgttgcagcaacattgggctttggtgcttatatgtcaaggcccatgggattgatcctaacatcaggactggggtgaggacaattaccactggcagccccatcacgtactccacctatggcaagtttcttgccgacggcgggtgctcggggggtgcttatgacataataatttgtgagagtgccactccacggatgcaacatccatcttgggcatcggcaccgtccttgaccaagcagagactgcgggggcaagactggttgtgcttgccaccgccacccctccgggctccgtcaccgtgcccctcataacatcgaggaggttgctctgtccaccaccggagagatccccttctatggcaaggctattccccttgagacaatcaagggggggagacatctcatcttctgccattcaaagaagaagtgcgacgagctcgccgcgaactggccgcgttgggcgttaatgccgtggcttactaccgcggccttgacgtgtccgtcatcccgaccagtggcaatgttgtcgtcgtggcaactgatgcactcatgaccggctataccggcgacttcgctcggtgatagactgcaatacgtgtgtcacccagacagtcgacttcagccttgaccctaccttcaccattgagacaaccacgcttccccaggatgctgtctcccgcactcaacgtcggggcaggactggcagggggaagccggcatctacagatttgtggcaccgggggagcgcccttccggcatgttcgactcgtccgtcctctgtgagtgctatgacgcgggctgtgcttggtatgagctcacacccgctgagaccacagttaggcacgagcgtacatgaacaccccgggactccctgtgtgccaagaccatcttgagttttgggaaggcgtcttcacgggtctcacccatatagacgcccacttcttatcccagacaaagcagagtggagaaaactttccttacctgtagcgtaccaagccaccgtgtgcgctagagcccaagcccctcccccatcgtgggaccagatgtggaagtgtttgatccgtctcaagcccaccctgcatgggccaacacctctgctatacagactggcgctgttcagaatgaaatcaccctgacgcacccggtcaccaagtatatcatgacatgcatgtcg

SEQ ID NO: 642 - DNA, 4874 bp, Hepatitis C virus
acaccaaccgtcgcccacaggacgtcaagttcccgggtggcggccagatcgttggtggagtttacttgttgccgcgcaggggccctagattgggtgtgcgcgcgacgaggaagacttccgagcggtccaacctcgaggtagacgtcagcctatccccaaggcgcgtcggcccgagggcaggacctgggcccagcccgggtacccttggcccctctatggcaatgagggctgcggatgggcgggatggctcctgtcccccgtggctctcggcctagctggggccccacagacccccggcgtaggtcgcgcaatttgggtaaggtcatcgataccctcacgtgcggcttcgccgacctcatggggtacattccgctcgtcggcgcccctctcggagggctgccagggccctggcgcatggcgtccgggttctggaagacggcgtgaactatgcaacagggaaccttcctggttgctctttctctatcttccttctggccctgctctcttgcctgactgtgcccgatcagcctatcaagtacgcaactcttcgggcctctaccatgtcaccaatgattgccctaactcgagtattgtgtacgagacggccgataccatcctacactctccggggtgtgtcccttgcgttcgcgagggtaacgcctcaaatgttgggtggctgtggcccccacggtcgccaccagggacggcaagctccccgcaacgcagcttcgacgtcacatcgatctgcttgtcgggggcgccaccctctgctcggccctctacgtgggggcttgtgcgggtccatctttcttgtcggccaactgttcacgttctcccccaggcgccactggacaacgcaagactgcaactgttctatctaccccggccacataacgggtcatcgcatggcatgggatatgatgatgaactgtcccctacaacagcgctggtagtagcccagctgctcagggttccacaagccatcttggatatgatcgctggtgctcactggggtgtcctagcgggcatagcgtatttttccatggtggggaactggggaaggttctggtggtgctgctgctgtttgccggcgtcgatgcggcaacctacaccaccgggggagctgctgccaggaccgcgtccacgttcgccggccttttcgatacgggcgccaagcagaatatccagctgatcaacacaacggcagttggcacatcaatcgcacggccttgaattgtaatgcgagcctcgacactggctgggtagcggggctcttctattaccaaaaattcaactcctcaggctgccccgagaggatggccagcttaagcccctcgccgatttcgaccaaggctggggccctatcagctacgccaacggaagcggccccgaacaccgcccctactgctggcactaccccccaaagccttgtggtatcgtgccagcgcagaacgtatgtggcccagttattgcttcactcctagccccgtggtggtgggaacaaccgacaagcggggtgcgcctacctacaactggggtggcaatgacacggacgtcctcgtccttaataacaccaggccaccgctgggcaattgttcggttgcacctggatgaactcatctggatttaccaaagtgtgcggagcgcctccttgtgtcatcggaggagtgggcaacaacaccttgcactgccccactgactgtttccgcaagcatccagaggccacatactctcgtgtggctccggtccctggatcacgcccaggtgcatggtccactatccttacaggctttggcattatccttgcaccgtcaactacaccgtgttcaaagtcaggatgtacgtgggaggggtcgagcacagctggaagttgcttgcaactggacgcggggcgagcgttgtgatctggacgacagggacaggtccgagctcagcccgctactgctgtccaccacacagtggcaggtccttccatgctccttcacgaccttgccagccttgacaccggcctcatccacctccaccagaacatcgtggacgtgcaatatttgtacggggtggggtcaagcatcgtgtcctgggccatcaagtgggagtatgtcatcctcttgtttctcctgcttgcagatggcgcatctgctcctgcttgtggatgatgctactcatatcccaggcggaagcagctttggagaacctcgtggtgctcaatgcggcgtctctggccgggacgcatggtcttgtgtccttcctcgtgttcttctgctttgcatgtacctgaggggtaagtgggtgcccggagcggcctacgccttctacgggatgtggcctctcctcctgctcctgttggcgttgccccagcgggcatacgcgctagacacggagacgaccgcgtcgtgtgcggcattgttcttgtcgggttaatggcgctgactctgtcaccgcattacaagcgctatgtcagctggtgcttatggtggcttcagtatttcctgaccagagtagaagcgcaactgcacgtgtgggtcccccccctcaacgtcggggggggcgtgacgctgtcatcttactcacgtgtgtcgtacacccggccttggtatttgacatcaccaagctgctgctggccgtcttcggacccctttggattcttcaaaccagcctgctcaaaggccctacttcgtgcgcgtccaaggccttctccggatctgcgcgctagtgcgcgagatggccggaggccattacgtgcagatggccatcatcaagatgggggcgcttactggcacctatgtttataaccatctcacccctctcgggactgggcgcacaacggcctacgagatctggccgtggctgtggagccagtcgtcttttcccagatggagaccaagctcattacgtggggggcggacaccgccgcatgtggtgacatcatcaacgcttgcccgtctccgcccgtaggggccgagagatattgctcggaccggccgacgggatggtctctaaagggtggaggttgctggcgcctatcacggcgtacgcccagcagacaaggggcctcttggggtgcataattaccagctgaccggccgggacaaaaaccaggtggagggtgaggtccagattgtgtcaactgctgcccagaccttcctggcaacctgcatcaacggggtgtgctggactgtctaccacggagccggaacaaggacatcgcgtcacccaggggtcctgttatccagatgtacaccaatgtagaccaagacttagtaggctggcccgctccccaaggtgcccgctcattgacaccctgcacttgcggctcctcggacctttacctggtcacgaggcagccgatgtcattcccgtgcgccggcggggtgacagcagaggcagtctgctttcgccccggcccatctcttacttaaaaggctcctcggggggcccactgctgtgccccgcgggacacgccgtaggcaattcagagccgcggtgtgcacccgtggagtggctaaggcggtggacttcatccccgtagagaacctagagacaaccatgaggtccccggtgttcacagacaactcctctccaccagcagtgccccagagcttccaggtggccacctgcatgctcccaccggcagcggtaagagcaccaaggtcccggccgcatatgctgctcagggctacaaggtgctggtgctcaacccttccgttgcagcaacattgggctttggtgcttatatgtcaaggcccatgggattgatcctaacatcaggactggggtgaggacaattaccactggcagccccatcacgtactccacctatggcaagtttcttgccgacggcgggtgctcggggggtgcttatgacataataatttgtgagagtgccactccacggatgcaacatccatcttgggcatcggcaccgtccttgaccaagcagagactgcgggggcaagactggttgtgcttgccaccgccacccctccgggctccgtcaccgtgcccctcataacatcgaggaggttgctctgtccaccaccggagagatccccttctatggcaaggctattccccttgagacaatcaagggggggagacatctcatcttctgccattcaaagaagaagtgcgacgagctcgccgcgaactggccgcgttgggcgttaatgccgtggcttactaccgcggccttgacgtgtccgtcatcccgaccagtggcgatgttgtcgtcgtggcaactgatgcactcatgaccggctataccggcgacttcgctcggtgatagactgcaatacgtgtgtcacccagacagtcgacttcagccttgaccctaccttcaccattgagacaaccacgcttccccaggatgctgtctcccgcactcaacgtcggggcaggactggcagggggaagccggcatctacagatttgtggcaccgggggagcgcccttccggcatgttcgactcgtccgtcctctgtgagtgctatgacgcgggctgtgcttggtatgagctcacacccgctgagaccacagttaggcacgagcgtacatgaacaccccgggactccctgtgtgccaagaccatcttgagttttgggaaggcgtcttcacgggtctcacccatatagacgcccacttcttatcccagacaaagcagagtggagaaaactttccttacctgtagcgtaccaagccaccgtgtgcgctagagcccaagcccctcccccatcgtgggaccagatgtggaagtgtttgatccgtctcaagcccaccctgcatgggccaacacctctgctatacagactggcgctgttcagaatgaaatcaccctgacgcacccggtcaccaagtatatcatgacatgcatgtcg

SEQ ID NO: 643 - DNA, 4874 bp, Hepatitis C virus
acaccaaccgtcgcccacaggacgtcaagttcccgggtggcggccagatcgttggtggagtttacttgttgccgcgcaggggccctagattgggtgtgcgcgcgacgaggaagacttccgagcggtccaacctcgaggtagacgtcagcctatccccaaggcgcgtcggcccgagggcaggacctgggcccagcccgggtacccttggcccctctatggcaatgagggctgcggatgggcgggatggctcctgtcccccgtggctctcggcctagctggggccccacagacccccggcgtaggtcgcgcaatttgggtaaggtcatcgataccctcacgtgcggcttcgccgacctcatggggtacattccgctcgtcggcgcccctctcggagggctgccagggccctggcgcatggcgtccgggttctggatgacggcgtgaactatgcaacagggaaccttcctggttgctctttctctatcttccttctggccctgctctcttgcctgactgtgcccgatcagcctatcaagtacgcaactcttcgggcctctaccatgtcaccaatgattgccctaactcgagtattgtgtacgagacggccgataccatcctacactctccggggtgtgtcccttgcgttcgcgagggtaacgcctcaaatgttgggtggctgtggcccccacggtcgccaccagggacggcaagctccccgcaacgcagcttcgacgtcacatcgatctgcttgtcgggggcgccaccctctgctcggccctctacgtgggggcttgtgcgggtccatctttcttgtcggccaactgttcacgttctcccccaggcgccactggacaacgcaagactgcaactgttctatctaccccggccacataacgggtcatcgcatggcatgggatatgatgatgaactgtcccctacaacagcgctggtagtagcccagctgctcagggttccacaagccatcttggatatgatcgctggtgctcactggggtgtcctagcgggcatagcgtatttttccatggtggggaactggggaaggttctggtggtgctgctgctgtttgccggcgtcgatgcggcaacctacaccaccgggggagctgctgccaggaccgcgtccacgttcgccggccttttcgatacgggcgccaagcagaatatccagctgatcaacacaacggcagttggcacatcaatcgcacggccttgaattgtaatgcgagcctcgacactggctgggtagcggggctcttctattaccaaaaattcaactcctcaggctgccccgagaggatggccagcttaagcccctcgccgatttcgaccaaggctggggccctatcagctacgccaacggaagcggccccgaacaccgcccctactgctggcactaccccccaaagccttgtggtatcgtgccagcgcagaacgtatgtggcccagttattgcttcactcctagccccgtggtggtgggaacaaccgacaagcggggtgcgcctacctacaactggggtggcaatgacacggacgtcctcgtccttaataacaccaggccaccgctgggcaattgttcggttgcacctggatgaactcatctggatttaccaaagtgtgcggagcgcctccttgtgtcatcggaggagtgggcaacaacaccttgcactgccccactgactgtttccgcaagcatccagaggccacatactctcgtgtggctccggtccctggatcacgcccaggtgcatggtccactatccttacaggctttggcattatccttgcaccgtcaactacaccgtgttcaaagtcaggatgtacgtgggaggggtcgagcacagctggaagttgcttgcaactggacgcggggcgagcgttgtgatctggacgacagggacaggtccgagctcagcccgctactgctgtccaccacacagtggcaggtccttccatgctccttcacgaccttgccagccttgacaccggcctcatccacctccaccagaacatcgtggacgtgcaatatttgtacggggtggggtcaagcatcgtgtcctgggccatcaagtgggagtatgtcatcctcttgtttctcctgcttgcagatggcgcatctgctcctgcttgtggatgatgctactcatatcccaggcggaagcagctttggagaacctcgtggtgctcaatgcggcgtctctggccgggacgcatggtcttgtgtccttcctcgtgttcttctgctttgcatgtacctgaggggtaagtgggtgcccggagcggcctacgccttctacgggatgtggcctctcctcctgctcctgttggcgttgccccagcgggcatacgcgctagacacggagacgaccgcgtcgtgtgcggcattgttcttgtcgggttaatggcgctgactctgtcaccgcattacaagcgctatgtcagctggtgcttatggtggcttcagtatttcctgaccagagtagaagcgcaactgcacgtgtgggtcccccccctcaacgtcggggggggcgtgacgctgtcatcttactcacgtgtgtcgtacacccggccttggtatttgacatcaccaagctgctgctggccgtcttcggacccctttggattcttcaaaccagcctgctcaaaggccctacttcgtgcgcgtccaaggccttctccggatctgcgcgctagtgcgcgagatggccggaggccattacgtgcagatggccatcatcaagatgggggcgcttactggcacctatgtttataaccatctcacccctctcgggactgggcgcacaacggcctacgagatctggccgtggctgtggagccagtcgtcttttcccagatggagaccaagctcattacgtggggggcggacaccgccgcatgtggtgacatcatcaacgcttgcccgtctccgcccgtaggggccgagagatattgctcggaccggccgacgggatggtctctaaagggtggaggttgctggcgcctatcacggcgtacgcccagcagacaaggggcctcttggggtgcataattaccagctgaccggccgggacaaaaaccaggtggagggtgaggtccagattgtgtcaactgctgcccagaccttcctggcaacctgcatcaacggggtgtgctggactgtctaccacggagccggaacaaggacatcgcgtcacccaggggtcctgttatccagatgtacaccaatgtagaccaagacttagtaggctgccccgctccccaaggtgcccgctcattgacaccctgcacttgcggctcctcggacctttacctggtcacgaggcagccgatgtcattcccgtgcgccggcggggtgacagcagaggcagtctgctttcgccccggcccatctcttacttaaaaggctcctcggggggcccactgctgtgccccgcgggacacgccgtaggcaattcagagccgcggtgtgcacccgtggagtggctaaggcggtggacttcatccccgtagagaacctagagacaaccatgaggtccccggtgttcacagacaactcctctccaccagcagtgccccagagcttccaggtggccacctgcatgctcccaccggcagcggtaagagcaccaaggtcccggccgcatatgctgctcagggctacaaggtgctggtgctcaacccttccgttgcagcaacattgggctttggtgcttatatgtcaaggcccatgggattgatcctaacatcaggactggggtgaggacaattaccactggcagccccatcacgtactccacctatggcaagtttcttgccgacggcgggtgctcggggggtgcttatgacataataatttgtgagagtgccactccacggatgcaacatccatcttgggcatcggcaccgtccttgaccaagcagagactgcgggggcaagactggttgtgcttgccaccgccacccctccgggctccgtcaccgtgcccctcataacatcgaggaggttgctctgtccaccaccggagagatccccttctatggcaaggctattccccttgagacaatcaagggggggagacatctcatcttctgccattcaaagaagaagtgcgacgagctcgccgcgaactggccgcgttgggcgttaatgccgtggcttactaccgcggccttgacgtgtccgtcatcccgaccagtggcgatgttgtcgtcgtggcaactgatgcactcatgaccggctataccggcgacttcgctcggtgatagactgcaatacgtgtgtcacccagacagtcgacttcagccttgaccctaccttcaccattgagacaaccacgcttccccaggatgctgtctcccgcactcaacgtcggggcaggactggcagggggaagccggcatctacagatttgtggcaccgggggagcgcccttccggcatgttcgactcgtccgtcctctgtgagtgctatgacgcgggctgtgcttggtatgagctcacacccgctgagaccacagttaggcacgagcgtacatgaacaccccgggactccctgtgtgccaagaccatcttgagttttgggaaggcgtcttcacgggtctcacccatatagacgcccacttcttatcccagacaaagcagagtggagaaaactttccttacctgtagcgtaccaagccaccgtgtgcgctagagcccaagcccctcccccatcgtgggaccagatgtggaagtgtttgatccgtctcaagcccaccctgcatgggccaacacctctgctatacagactggcgctgttcagaatgaaatcaccctgacgcacccggtcaccaagtatatcatgacatgcatgtcg

SEQ ID NO: 644 - DNA, 4874 bp, Hepatitis C virus
acaccaaccgtcgcccacaggacgtcaagttcccgggtggcggccagatcgttggtggagtttacttgttgccgcgcaggggccctagattgggtgtgcgcgcgacgaggaagacttccgagcggtccaacctcgaggtagacgtcagcctatccccaaggcgcgtcggcccgagggcaggacctgggcccagcccgggtacccttggcccctctatggcaatgagggctgcggatgggcgggatggctcctgtcccccgtggctctcggcctagctggggccccacagacccccggcgtaggtcgcgcaatttgggtaaggtcatcgataccctcacgtgcggcttcgccgacctcatggggtacattccgctcgtcggcgcccctctcggagggctgccagggccctggcgcatggcgtccgggttctggaagacggcgtgaactatgcaacagggaaccttcctggttgctctttctctatcttccttctggccctgctctcttgcctgactgtgcccgatcagcctatcaagtacgcaactcttcgggcctctaccatgtcaccaatgattgccctaactcgagtattgtgtacgagacggccgataccatcctacactctccggggtgtgtcccttgcgttcgcgagggtaacgcctcaaatgttgggtggctgtggcccccacggtcgccaccagggacggcaagctccccgcaacgcagcttcgacgtcacatcgatctgcttgtcgggggcgccaccctctgctcggccctctacgtgggggcttgtgcgggtccatctttcttgtcggccaactgttcactttctcccccaggcgccactggacaacgcaagactgcaactgttctatctaccccggccacataacgggtcaccgcatggcatgggatatgatgatgaactgtcccctacaacagcgctggtagtagcccagctgctcagggttccacaagccatcttggatatgatcgctggtgctcactggggtgtcctagcgggcatagcgtatttttccatggtggggaactggggaaggttctggtggtgctgctgctgtttgccggcgtcgacgcgggaacctacaccaccgggggagctgctgccaggaccgcgtccacgttcgccggccttttcgatacgggcgccaagcagaatatccagctgatcaacacaacggcagttggcacatcaatcgcacggccttgaattgtaatgcgagcctcgacactggctgggtagcggggctcttctattaccaaaaattcaactcctcaggctgccccgagaggatggccagcttaagcccctcgccgatttcgaccaaggctggggccctatcagctacgccaacggaagcggccccgaacaccgcccctactgctggcactaccccccaaagccttgtggtatcgtgccagcgcagaacgtatgtggcccagttattgcttcactcctagccccgtggtggtgggaacaaccgacaagcggggtgcgcctacctacaactggggtagcaatgacacggacgtcctcgtccttaataacaccaggccaccgctgggcaattgttcggttgcacctggatgaactcatccggatttaccaaagtgtgtggagcgcctccttgtgtcatcggaggagtgggcaacaacaccttgcactgccccactgactgtttccgcaagcatccagaggccacatactctcgtgtggctccggtccctggatcacgcccaggtgcatggtccactatccttacaggctttggcattatccttgcaccgtcaactacaccgtgttcaaagtcaggatgtacgtgggaggggtcgagcacagctggaagttgcttgcaactggacgcggggcgagcgttgtgatctggacgacagggacaggtccgagctcagcccgttgctgctgtccaccacacagtggcaggtccttccatgctccttcacgaccttgccagccttgacaccggcctcatccacctccaccagaacatcgtggacgtgcaatatttgtacggggtggggtcaagcatcgtgtcctgggccatcaagtgggagtatgtcatcctcttgtttctcctgcttgcagatggcgcatctgctcctgcttgtggatgatgctactcatatcccaggcggaagcagctttggagaacctcgtggtgctcaatgcggcgtctctggccgggacgcatggtcttgtgtccttcctcgtgttcttctgctttgcatgtacctgaggggtaagtgggtgcccggagcggcctacgccttctacgggatgtggcctctcctcctgctcctgttggcgttgccccagcgggcatacgcgctagacacggagacgaccgcgtcgtgtgcggcattgttcttgtcgggttaatggcgctgactctgtcaccgcattacaagcgctatgtcagctggtgcttatggtggcttcagtatttcctgaccagagtagaagcgcaactgcacgtgtgggtcccccccctcaacgtcggggggggcgtgacgccgtcatcttactcacgtgtgtcgtacacccggccttggtatttgacatcaccaagctgctgctggccgtcttcggacccctttggattcttcaaaccagcctgctcaaaggccctacttcgtgcgcgtccaaggccttctccggatctgcgcgctagtgcgcgagatggtcggaggccattacgtgcagatggccatcatcaagatgggggcgcttactggcacctatgtttataaccatctcacccctctcgggactgggcgcacaacggcctacgagatctggccgtggctgtggagccagtcgtcttttcccagatggagaccaagctcattacgtggggggcagacaccgccgcatgtggtgacatcatcaacgcttgcccgtctccgcccgtaggggccgagagatattgctcggaccggccgacgggatggtctctaaagggtggaggttgctggcgcctatcacggcgtacgcccagcagacaaggggcctcttggggtgcataattaccagctgaccggccgggacaaaaaccaggtggagggtgaggtccagattgtgtcaactgctgcccagaccttcctggcaacctgcatcaacggggtgtgctggactgtctaccacggagccggaacaaggacatcgcgtcacccaggggtcctgttatccagatgtacaccaatgtagaccaagacttagtaggctggcccgctccccaaggtgcccgctcattgacaccctgcacttgcggctcctcggacctttacctggtcacgaggcagccgatgtcattcccgtgcgccggcggggtgacagcagaggcagtctgctttcgccccggcccatctcttacttaaaaggctcctcggggggcccactgctgtgccccgcgggacacgccgtaggcaattcagagccgcggtgtgcacccgtggagtggctaaggcggtggacttcatccccgtagagaacctagagacaaccatgaggtccccggtgttcacagacaactcctctccaccagcagtgccccagagcttccaggtggccacctgcatgctcccaccggcagcggtaagagcaccaaggtcccggccgcatatgctgctcagggctacaaggtgctggtgctcaacccttccgttgcagcaacattgggctttggtgcttatatgtcaaggcccatgggattgatcctaacatcaggactggggtgaggacaattaccactggcagccccatcacgtactccacctatggcaagtttcttgccgacggcgggtgctcggggggtgcttatgacataataatttgtgagagtgccactccacggatgcaacatccatcttgggcatcggcaccgtccttgaccaagcagagactgcgggggcaagactggttgtgcttgccaccgccacccctccgggctccgtcaccgtgcccctcataacatcgaggaggttgctctgtccaccaccggagagatccccttctatggcaaggctattccccttgagacaatcaagggggggagacatctcatcttctgccattcaaagaagaagtgcgacgagctcgccgcgaactggccgcgttgggcgttaatgccgtggcttactaccgcggccttgacgtgtccgtcatcccgaccagtggcgatgttgtcgtcgtggcaactgatgcactcatgaccggctataccggcgacttcgctcggtgatagactgcaatacgtgtgtcacccagacagtcgacttcagccttgaccctacctttaccattgagacaaccacgcttccccaggatgctgtctcccgcactcaacgtcggggcaggactggcagggggaagccggcatctacagatttgtggcaccgggggagcgcccttccggcatgttcgactcgtccgtcctctgtgagtgctatgacgcgggctgtgcttggtatgagctcacacccgctgagaccacagttaggcacgagcgtacatgaacaccccggggctccctgtgtgccaagaccatcttgagttttgggaaggcgtcttcacgggtctcacccatatagacgcccacttcttatctcagacaaagcagagtggagaaaactttccttacctgtagcgtaccaagccaccgtgtgcgctagagcccaagcccctcccccatcgtgggaccagatgtggaagtgtttgatccgtctcaagcccacccttcatgggccaacacctctgctatacagactggcgctgttcagaatgaaatcaccctgacgcacccggtcaccaagtatatcatgacatgcatgtcg

SEQ ID NO: 645 - DNA, 4874 bp, Hepatitis C virus
acaccaaccgtcgcccacaggacgtcaagttcccgggtggcggccagatcgttggtggagtttacttgttgccgcgcaggggccctagattgggtgtgcgcgcgacgaggaagacttccgagcggtccaacctcgaggtagacgtcagcctatccccaaggcgcgtcggcccgagggcaggacctgggcccagcccgggtacccttggcccctctatggcaatgagggctgcggatgggcgggatggctcctgtcccccgtggctctcggcctagctggggccccacagacccccggcgtaggtcgcgcaatttgggtaaggtcatcgataccctcacgtgcggcttcgccgacctcatggggtacattccgctcgtcggcgcccctctcggagggctgccagggccctggcgcatggcgtccgggttctggaagacggcgtgaactatgcaacagggaaccttcctggttgctctttctctatcttccttctggccctgctctcttgcctgactgtgcccgatcagcctatcaagtacgcaactcttcgggcctctaccatgtcaccaatgattgccctaactcgagtattgtgtacgagacggccgataccatcctacactctccggggtgtgtcccttgcgttcgcgagggtaacgcctcaaatgttgggtggctgtggcccccacggtcgccaccagggacggcaagctccccgcaacgcagcttcgacgtcacatcgatctgcttgtcgggggcgccaccctctgctcggccctctacgtgggggcttgtgcgggtccatctttcttgtcggccaactgttcactttctcccccaggcgccactggacaacgcaagactgcaactgttctatctaccccggccacataacgggtcaccgcatggcatgggatatgatgatgaactgtcccctacaacagcgctggtagtagcccagctgctcagggttccacaagccatcttggatatgatcgctggtgctcactggggtgtcctagcgggcatagcgtatttttccatggtggggaactggggaaggttctggtggtgctgctgctgtttgccggcgtcgatgcggcaacctacaccactgggggagctgctgccaggaccgcgtccacgttcgccggccttttcgatacgggcgccaagcagaatatccagctgatcaacacaacggcagttggcacatcaatcgcacggccttgaattgtaatgcgagcctcgacactggctgggtagcggggctcttctattaccaaaaattcaactcctcaggctgccccgagaggatggccagctcaagcccctcgccgatttcgaccaaggctggggccctatcagctacgccaacggaagcggccccgaacaccgcccctactgctggcactaccccccaaaaccttgtggtatcgtgccagcgcagaacgtatgtggcccagttattgcttcactcctagccccgtggtggtgggaacaaccgacaagcggggtgcgcctacctacaactggggtagcaatgacacggacgtcctcgtccttaataacaccaggccaccgctgggcaattgttcggttgcacctggatgaactcatctggatttaccaaagtgtgtggagcgcctccttgtgtcatcggaggagcgggcaacaacaccttgcactgccccactgactgtttccgcaagcatccagaggccacatactctcgtgtggctccggtccctggatcacgcccaggtgcatggtccactatccttacaggctttggcattatccttgcaccgtcaactacaccgtgttcaaagtcaggatgtacgtgggaggggtcgagcacagctggaagttgcttgcaactggacgcggggcgagcgttgtgatctggacgacagggacaggtccgagctcagcccgctgctgctgtccaccacacagtggcaggtccttccatgctccttcacgaccttgccagccttgacaccggcctcatccatctccaccagaacatcgtggacgtgcaatatttgtacggggtggggtcaagcatcgtgtcctgggccatcaagtgggagtatgtcatcctcttgtttctcctgcttgcagatggcgcatctgctcctgcttgtggatgatgctactcatatcccaggcggaagcagctttggagaacctcgtggtgctcaatgcggcgtctctggccgggacgcatggtcttgtgtccttcctcgtgttcttctgctttgcatgtacctgaggggtaagtgggtgcccggagcggcctacgccttctacgggatgtggcctctcctcctgctcctgttggcgttgccccagcgggcatacgcgctagacacggagacgaccgcgtcgtgtgcggcattgttcttgtcgggttaatggcgctgactctgtcaccgcattacaagcgctatgtcagctggtgcttatggtggcttcagtatttcctgaccagagtagaagcgcaactgcacgtgtgggtcccccccctcaacgtcggggggggcgtgacgctgtcatcttactcacgtgtgtcgtacacccggccttggtatttgacatcaccaagctgctgctggccgtcttcggacccctttggattcttcaaaccagcctgctcaaaggccctacttcgtgcgcgtccaaggccttctccggatctgcgcgctagtgcgcgagatggccggaggccattacgtgcagatggccatcatcaagatgggggcgcttactggcacctatgtttataaccatctcacccctctcgggactgggcgcacaacggcctacgagatctggccgtggctgtggagccagtcgtcttttcccagatggagaccaagctcattacgtggggggcagacaccgccgcatgtggtgacatcatcaacgcttgcccgtctccgcccgtaggggccgagagatattgctcggaccggccgacgggatggtctctaaagggtggaggttgctggcgcctatcacggcgtacgcccagcagacaaggggcctcttggggtgcataattaccagctgaccggccgggacaaaaaccaggtggagggtgaggtccagattgtgtcaactgctgcccagaccttcctggcaacctgcatcaacggggtgtgctggactgtctaccacggagccggaacaaggacatcgcgtcacccaggggtcctgttatccagatgtacaccaatgtagaccaagacttagtaggctggcccgctccccaaggtgcccgctcattgacaccctgcacttgcggctcctcggacctttacctggtcacgaggcagccgatgtcattcccgtgcgccggcggggtgacagcagaggcagtctgctttcgcctcggcccatctcttacttaaaaggctcctcggggggcccactgctgtgccccgcgggacacgccgtaggcaattcagagccgcggtgtgcacccgtggagtggctaagacggtggacttcatccccgtagagaacctagagacaaccatgaggtccccggtgttcacagacaactcctctccaccagcagtgccccagagcttccaggtggccacctgcatgctcccaccggcagcggtaagagcaccaaggtcccggccgcatatgctgctcagggctacacggtgctggtgctcaacccttccgttgcagcaacattgggctttggtgcttatatgtcaaggcccatgggattgatcctaacatcaggactggggtgaggacaattactactggcagccccatcacgtactccacctatggcaagtttcttgccgacggcgggtgctcggggggtgcttatgacataataatttgtgagagtgccactccacggatgcaacatccatcttgggcatcggcaccgtccttgaccaagcagagactgcgggggcaagactggttgygcttgccaccgccacccctccgggctccgtcaccgtgcccctcataacatcgaggaggttgctctgtccaccaccggagagatccccttctatggcaaggctattccccttgagacaatcaagggggggagacatctcatcttctgccattcaaagaagaagtgcgacgagctcgccgcgaactggccgcgttgggcgttaatgccgtggcttactaccgcgaccttgacgtgtccgtcatcccgaccagtggcgatgttgtcgtcgtggcaactgatgcactcatgaccggctataccggcgacttcgctcggtgatagactgcaatacgtgtgtcacccagacagtcgacttcagccttgaccctaccttcaccattgagacaaccacgcttccccaggatgctgtctcccgcactcaacgtcggggcaggactggcagggggaagccggcatctacagatttgtggcaccgggggagcgcccttccggcatgttcgactcgtccgtcctctgtgagtgctatgacgcgggctgtgcttggtatgagctcacacccgctgagaccacagttaggcacgagcgtacatgaacaccccgggactccctgtgtgccaagaccatcttgagttttgggaaggcgtcttcacgggtctcacccatatagacgcccacttcttatcccagacaaagcagagtggagaaaactttccttacctgtagcgtaccaagccaccgtgtgcgctagagcccaagcccctcccccatcgtgggaccagatgtggaagtgtttgatccgtctcaagcccacccttcatgggccaacacctctgctatacagactggcgctgttcagaatgaaatcaccctgacgcacccggtcaccaagtatatcatgacatgcatgtcg

SEQ ID NO: 646 - DNA, 4874 bp, Hepatitis C virus
acaccaaccgtcgcccacaggacgtcaagttcccgggtggcggccagatcgttggtggagtttacttgttgccgcgcaggggccctagattgggtgtgcgcgcgacgaggaagacttccgagcggtccaacctcgaggtagacgtcagcctatccccaaggcgcgtcggcccgagggcaggacctgggcccagcccgggtacccttggcccctctatggcaatgagggctgcggatgggcgggatggctcctgtcccccgtggctctcggcctagctggggccccacagacccccggcgtaggtcgcgcaatttgggtaaggtcatcgataccctcacgtgcggcttcgccgacctcatggggtacattccgctcgtcggcgcccctctcggagggctgccagggccctggcgcatggcgtccgggttctggaagacggcgtgaactatgcaacagggaaccttcctggttgctctttctctatcttccttctggccctgctctcttgcctgactgtgcccgatcagcctatcaagtacgcaactcttcgggcctctaccatgtcaccaatgattgccctaactcgagtattgtgtacgagacggccgataccatcctacactctccggggtgtgtcccttgcgttcgcgagggtaacgcctcaaatgttgggtggctgtggcccccacggtcgccaccagggacggcaagctccccgcaacgcagcttcgacgtcacatcgatctgcttgtcgggggcgccaccctctgctcggccctctacgtgggggcttgtgcgggtccatctttcttgtcggccaactgttcacgttctcccccaggcgccactggacaacgcaagactgcaactgttctatctaccccggccacataacgggtcatcgcatggcatgggatatgatgatgaactgtcccctacaacagcgctggtagtagcccagctgctcagggttccacaagccatcttggatatgatcgctggtgctcactggggtgtcctagcgggcatagcgtatttttccatggtggggaactggggaaggttctggtggtgctgctgctgtttgccggcgtcgatgcggcaacctacaccaccgggggagctgctgccaggaccgcgtccacgttcgccggccttttcgatacgggcgccaagcagaatatccaggtgatcaacacaacggcagttggcacatcaatcgcacggccttgaattgtaatgcgagcctcgacactggctgggtagcggggctcttctattaccaaaaattcaactcctcaggctgccccgagaggatggccagcttaagcccctcgccgatttcgaccaaggctggggccctatcagctacgccaacggaagcggccccgaacaccgcccctactgctggcactaccccccaaagccttgtggtatcgtgccagcgcagaacgtatgtggcccagttattgcttcactcctagccccgtggtggtgggaacaaccgacaagcggggtgcgcctacctacaactggggtggcaatgacacggacgtcctcgtccttaataacaccaggccaccgctgggcaattgttcggttgcacctggatgaactcatctggatttaccaaagtgtgcggagcgcctccttgtgtcatcggaggagtgggcaacaacaccttgcactgccccactgactgtttccgcaagcatccagaggccacatactctcgtgtggctccggtccctggatcacgcccaggtgcatggtccactatccttacaggctttggcattatccttgcaccgtcaactacaccgtgttcaaagtcaggatgtacgtgggaggggtcgagcacagctggaagttgcttgcaactggacgcggggcgagcgttgtgatctggacgacagggacaggtccgagctcagcccgctactgctgtccaccacacagtggcaggtccttccatgctccttcacgaccttgccagccttgacaccggcctcatccacctccaccagaacatcgtggacgtgcaatatttgtacggggtggggtcaagcatcgtgtcctgggccatcaagtgggagtatgtcatcctcttgtttctcctgcttgcagatggcgcatctgctcctgcttgtggatgatgctactcatatcccaggcggaagcagctttggagaacctcgtggtgctcaatgcggcgtctctggccgggacgcatggtcttgtgtccttcctcgtgttcttctgctttgcatgtacctgaggggtaagtgggtgcccggagcggcctacgccttctacgggatgtggcctctcctcctgctcctgttggcgttgccccagcgggcatacgcgctagacacggagacgaccgcgtcgtgtgcggcattgttcttgtcgggttaatggcgctgactctgtcaccgcattacaagcgctatgtcagctggtgcttatggtggcttcagtatttcctgaccagagtagaagcgcaactgcacgtgtgggtcccccccctcaacgtcggggggggcgtgacgctgtcatcttactcacgtgtgtcgtacacccggccttggtatttgacatcaccaagctgctgctggccgtcttcggacccctttggattcttcaaaccagcctgctcaaaggccctacttcgtgcgcgtccaaggccttctccggatctgcgcgctagtgcgcgagatggccggaggccattacgtgcagatggccatcatcaagatgggggcgcttactggcacctatgtttataaccatctcacccctctcgggactgggcgcacaacggcctacgagatctggccgtggctgtggagccagtcgtcttttcccagatggagaccaagctcattacgtggggggcggacaccgccgcatgtggtgacatcatcaacgcttgcccgtctccgcccgtaggggccgagagatattgctcggaccggccgacgggatggtctctaaagggtggaggttgctggcgcctatcacggcgtacgcccagcagacaaggggcctcttggggtgcataattaccagctgaccggccgggacaaaaaccaggtggagggtgaggtccagattgtgtcaactgctgcccagaccttcctggcaacctgcatcaacggggtgtgctggactgtctaccacggagccggaacaaggacatcgcgtcacccaggggtcctgttatccagatgtacaccaatgtagaccaagacttagtaggctggcccgctccccaaggtgcccgctcattgacaccctgcacttgcggctcctcggacctttacctggtcacgaggcagccgatgtcattcccgtgcgccggcggggtgacagcagaggcagtctgctttcgccccggcccatctcttacttaaaaggctcctcggggggcccactgctgtgccccgcgggacacgccgtaggcaattcagagccgcggtgtgcacccgtggagtggctaaggcggtggacttcatccccgtagagaacctagagacaaccatgaggtccccggtgttcacagacaactcctctccaccagcagtgccccagagcttccaggtggccacctgcatgctcccaccggcagcggtaagagcaccaaggtcccggccgcatatgctgctcagggctacaaggtgctggtgctcaacccttccgttgcagcaacattgggctttggtgcttatatgtcaaggcccatgggattgatcctaacatcaggactggggtgaggacaattaccactggcagccccatcacgtactccacctatggcaagtttcttgccgacggcgggtgctcggggggtgcttatgacataataatttgtgagagtgccactccacggatgcaacatccatcttgggcatcggcaccgtccttgaccaagcagagactgcgggggcaagactggttgtgcttgccaccgccacccctccgggctccgtcaccgtgcccctcataacatcgaggaggttgctctgtccaccaccggagagatccccttctatggcaaggctattccccttgagacaatcaagggggggagacatctcatcttctgccattcaaagaagaagtgcgacgagctcgccgcgaactggccgcgttgggcgttaatgccgtggcttactaccgcggccttgacgtgtccgtcatcccgaccagtggcgatgttgtcgtcgtggcaactgatgcactcatgaccggctataccggcgacttcgctcggtgatagactgcaatacgtgtgtcacccagacagtcgacttcagccttgaccctaccttcaccattgagacaaccacgcttccccaggatgctgtctcccgcactcaacgtcggggcaggactggcagggggaagccggcatctacagatttgtggcaccgggggagcgcccttccggcatgttcgactcgtccgtcctctgtgagtgctatgacgcgggctgtgcttggtatgagctcacacccgctgagaccacagttaggcacgagcgtacatgaacaccccgggactccctgtgtgccaagaccatcttgagttttgggaaggcgtcttcacgggtctcacccatatagacgcccacttcttatcccagacaaagcagagtggagaaaactttccttacctgtagcgtaccaagccaccgtgtgcgctagagcccaagcccctcccccatcgtgggaccagatgtggaagtgtttgatccgtctcaagcccaccctgcatgggccaacacctctgctatacagactggcgctgttcagaatgaaatcaccctgacgcacccggtcaccaagtatatcatgacatgcatgtcg

SEQ ID NO: 647 - DNA, 4874 bp, Hepatitis C virus
acaccaaccgtcgcccacaggacgtcaagttcccgggtggcggccagatcgttggtggagtttacttgttgccgcgcaggggccctagattgggtgtgcgcgcgacgaggaagacttccgagcggtccaacctcgaggtagacgtcagcctatccccaaggcgcgtcggcccgagggcaggacctgggcccagcccgggtacccttggcccctctatggcaatgagggctgcggatgggcgggatggctcctgtcccccgtggctctcggcctagctggggccccacagacccccggcgtaggtcgcgcaatttgggtaaggtcatcgataccctcacgtgcggcttcgccgacctcatggggtacattccgctcgtcggcgcccctctcggagggctgccagggccctggcgcatggcgtccgggttctggaagacggcgtgaactatgcaacagggaaccttcctggttgctctttctctatcttccttctggccctgctctcttgcctgactgtgcccgatcagcctatcaagtacgcaactcttcgggcctctaccatgtcaccaatgattgccctaactcgagtattgtgtacgagacggccgataccatcctacactctccggggtgtgtcccttgcgttcgcgagggtaacgcctcaaatgttgggtggctgtggcccccacggtcgccaccagggacggcaagctccccgcaacgcagcttcgacgtcacatcgatctgcttgtcgggggcgccaccctctgctcggccctctacgtgggggcttgtgcgggtccatctttcttgtcggccaactgttcacgttctcccccaggcgccactggacaacgcaagactgcaactgttctatctaccccggccacataacgggtcatcgcatggcatgggatatgatgatgaactgtcccctacaacagcgctggtagtagcccagctgctcagggttccacaagccatcttggatatgatcgctggtgctcactggggtgtcctagcgggcatagcgtatttttccatggtggggaactggggaaggttctggtggtgctgctgctgtttgccggcgtcgatgcggcaacctacaccaccgggggagctgctgccaggaccgcgtccacgttcgccggccttttcgatacgggcgccaagcagaatatccagctgatcaacacaacggcagttggcacatcaatcgcacggccttgaattgtaatgcgagcctcgacactggctgggtagcggggctcttctattaccaaaaattcaactcctcaggctgccccgagaggatggccagcttaagcccctcgccgatttcgaccaaggctggggccctatcagctacgccaacggaagcggccccgaacaccgcccctactgctggcactaccccccaaagccttgtggtatcgtgccagcgcagaacgtatgtggcccagttattgcttcactcctagccccgtggtggtgggaacaaccgacaagcggggtgcgcctacctacaactggggtggcaatgacacggacgtcctcgtccttaataacaccaggccaccgctgggcaattgttcggttgcacctggatgaactcatctggatttaccaaagtgtgcggagcgcctccttgtgtcatcggaggagtgggcaacaacaccttgcactgccccactgactgtttccgcaagcatccagaggccacatactctcgtgtggctccggtccctggatcacgcccaggtgcatggtccactatccttacaggctttggcattatccttgcaccgtcaactacaccgtgttcaaagtcaggatgtacgtgggaggggtcgagcacagctggaagttgcttgcaactggacgcggggcgagcgttgtgatctggacgacagggacaggtccgagctcagcccgctactgctgtccaccacacagtggcaggtccttccatgctccttcacgaccttgccagccttgacaccggcctcatccacctccaccagaacatcgtggacgtgcaatatttgtacggggtggggtcaagcatcgtgtcctgggccatcaagtgggagtatgtcatcctcttgtttctcctgcttgcagatggcgcatctgctcctgcttgtggatgatgctactcatatcccaggcggaagcagctttggagaacctcgtggtgctcaatgcggcgtctctggccgggacgcatggtcttgtgtccttcctcgtgttcttctgctttgcatgtacctgaggggtaagtgggtgcccggagcggcctacgccttctacgggatgtggcctctcctcctgctcctgttggcgttgccccagcgggcatacgcgctagacacggagacgaccgcgtcgtgtgcggcattgttcttgtcgggttaatggcgctgactctgtcaccgcattacaagcgctatgtcagctggtgcttatggtggcttcagtatttcctgaccagagtagaagcgcaactgcacgtgtgggtcccccccctcaacgtcggggggggcgtgacgctgtcatcttactcacgtgtgtcgtacacccggccttggtatttgacatcaccaagctgctgctggccgtcttcggacccctttggattcttcaaaccagcctgctcaaaggccctacttcgtgcgcgtccaaggccttctccggatctgcgcgctagtgcgcgagatggccggaggccattacgtgcagatggccatcatcaagatgggggcgcttactggcacctatgtttataaccatctcacccctctcgggactgggcgcacaacggcctacgagatctggccgtggctgtggagccagtcgtcttttcccagatggagaccaagctcattacgtggggggcggacaccgccgcatgtggtgacatcatcaacgcttgcccgtctccgcccgtaggggccgagagatattgctcggaccggccgacgggatggtctctaaagggtggaggttgctggcgcctatcacggcgtacgcccagcagacaaggggcctcttggggtgcataattaccagctgaccggccgggacaaaaaccaggtggagggtgaggtccagattgtgtcaactgctgcccagaccttcctggcaacctgcatcaacggggtgtgctggactgtctaccacggagccggaacaaggacatcgcgtcacccaggggtcctgttatccagatgtacaccaatgtagaccaagacttagtaggctggcccgctccccaaggtgcccgctcattgacaccctgcacttgcggctcctcggacctttacctggtcacgaggcagccgatgtcattcccgtgcgccggcggggtgacagcagaggcagtctgctttcgccccggcccatctcttacttaaaaggctcctcggggggcccactgctgtgccccgcgggacacgccgtgggcaattcagagccgcggtgtgcacccgtggagtggctaaggcggtggacttcatccccgtagagaacctagagacaaccatgaggtccccggtgttcacagacaactcctctccaccagcagtgccccagagcttccaggtggccacctgcatgctcccaccggcagcggtaagagcaccaaggtcccggccgcatatgctgctcagggctacaaggtgctggtgctcaacccttccgttgcagcaacattgggctttggtgcttatatgtcaaggcccatgggattgatcctaacatcaggactggggtgaggacaattaccactggcagccccatcacgtactccacctatggcaagtttcttgccgacggcgggtgctcggggggtgcttatgacataataatttgtgagagtgccactccacggatgcaacatccatcttgggcatcggcaccgtccttgaccaagcagagactgcgggggcaagactggttgtgcttgccaccgccacccctccgggctccgtcaccgtgcccctcataacatcgaggaggttgctctgtccaccaccggagagatccccttctatggcaaggctattccccttgagacaatcaagggggggagacatctcatcttctgccattcaaagaagaagtgcgacgagctcgccgcgaactggccgcgttgggcgttaatgccgtggcttactaccgcggccttgacgtgtccgtcatcccgaccagtggcgatgttgtcgtcgtggcaactgatgcactcatgaccggctataccggcgacttcgctcggtgatagactgcaatacgtgtgtcacccagacagtcgacttcagccttgaccctaccttcaccattgagacaaccacgcttccccaggatgctgtctcccgcactcaacgtcggggcaggactggcagggggaagccggcatctacagatttgtggcaccgggggagcgcccttccggcatgttcgactcgtccgtcctctgtgagtgctatgacgcgggctgtgcttggtatgagctcacacccgctgagaccacagttaggcacgagcgtacatgaacaccccgggactccctgtgtgccaagaccatcttgagttttgggaaggcgtcttcacgggtctcacccatatagacgcccacttcttatcccagacaaagcagagtggagaaaactttccttacctgtagcgtaccaagccaccgtgtgcgctagagcccaagcccctcccccatcgtgggaccagatgtggaagtgtttgatccgtctcaagcccaccctgcatgggccaacacctctgctatacagactggcgctgttcagaatgaaatcaccctgacgcacccggtcaccaagtatatcatgacatgcatgtcg

SEQ ID NO: 648 - DNA, 4874 bp, Hepatitis C virus
acaccaaccgtcgcccacaggacgtcaagttcccgggtggcggccagatcgttggtggagtttacttgttgccgcgcaggggccctagattgggtgtgcgcgcgacgaggaagacttccgagcggtccaacctcgaggtagacgtcagcctatccccaaggcgcgtcggcccgagggcaggacctgggcccagcccgggtacccttggcccctctatggcaatgagggctgcggatgggcgggatggctcctgtcccccgtggctctcggcctagctggggccccacagacccccggcgtaggtcgcgcaatttgggtaaggtcatcgataccctcacgtgcggcttcgccgacctcatggggtacattccgctcgtcggcgcccctctcggagggctgccagggccctggcgcatggcgtccgggttctggaagacggcgtgaactatgcaacagggaaccttcctggttgctctttctctatcttccttctggccctgctctcttgcctgactgtgcccgatcagcctatcaagtacgcaactcttcgggcctctaccatgtcaccaatgattgccctaactcgagtattgtgtacgagacggccgataccatcctacactctccggggtgtgtcccttgcgttcgcgagggtaacgcctcaaatgttgggtggctgtggcccccacggtcgccaccagggacggcaagctccccgcaacgcagcttcgacgtcacatcgatctgcttgtcgggggcgccaccctctgctcggccctctacgtgggggcttgtgcgggtccatctttcttgtcggccaactgttcactttctcccccaggcgccactggacaacgcaagactgcaactgttctatctaccccggccacataacgggtcaccgcatggcatgggatatgatgatgaactgtcccctacaacagcgctggtagtagcccagctgctcagggttccacaagccatcttggatatgatcgctggtgctcactggggtgtcctagcgggcatagcgtatttttccatggtggggaactggggaaggttctggtggtgctgctgctgtttgccggcgtcgatgcggcaacctacaccactgggggagctgctgccaggaccgcgtccacgttcgccggccttttcgatacgggcgccaagcagaatatccagctgatcaacacaacggcagttggcacatcaatcgcacggccttgaattgtaatgcgagcctcgacactggctgggtagcggggctcttctattaccaaaaattcaactcctcaggctgccccgagaggatggccagctcaagcccctcgccgatttcgaccaaggctggggccctatcagctacgccaacggaagcggccccgaacaccgcccctactgctggcactaccccccaaagccttgtggtatcgtgccagcgcagaacgtatgtggcccagttattgcttcactcctagccccgtggtggtgggaacaaccgacaagcggggtgcgcctacctacaactggggtagcaatgacacggacgtcctcgtccttaataacaccaggccaccgctgggcaattgttcggttgcacctggatgaactcatctggatttaccaaagtgtgtggagcgcctccttgtgtcatcggaggagcgggcaacaacaccttgcactgccccactgactgtttccgcaagcatccagaggccacatactctcgtgtggctccggtccctggatcacgcccaggtgcatggtccactatccttacaggctttggcattatccttgcaccgtcaactacaccgtgttcaaagtcaggatgtacgtgggaggggtcgagcacagctggaagttgcttgcaactggacgcggggcgagcgttgtgatctggacgacagggacaggtccgagctcagcccgctgctgctgtccaccacacagtggcaggtccttccatgctccttcacgaccttgccagccttgacaccggcctcatccacctccaccagaacatcgtggacgtgcaatatttgtacggggtggggtcaagcatcgtgtcctgggccatcaagtgggagtatgtcatcctcttgtttctcctgcttgcagatggcgcatctgctcctgcttgtggatgatgctactcatatcccaggcggaagcagctttggagaacctcgtggtgctcaatgcggcgtctctggccgggacgcatggtcttgtgtccttcctcgtgttcttctgctttgcatgtacctgaggggtaagtgggtgcccggagcggcctacgccttctacgggatgtggcctctcctcctgctcctgttggcgttgccccagcgggcatacgcgctagacacggagacgaccgcgtcgtgtgcggcattgttcttgtcgggttaatggcgctgactctgtcaccgcattacaagcgctatgtcagctggtgcttatggtggcttcagtatttcctgaccagagtagaagcgcaactgcacgtgtgggtcccccccctcaacgtcggggggggcgtgacgctgtcatcttactcacgtgtgtcgaacacccggccttggtatttgacatcaccaagctgctgctggccgtcttcggacccctttggattcttcaaaccagcctgctcaaaggccctacttcgtgcgcgtccaaggccttctccggatctgcgcgctagtgcgcgagatggccggaggccattacgtgcagatggccatcatcaagatgggggcgcttactggcacctatgtttataaccatctcacccctctcgggactgggcgcacaacggcctacgagatctggccgtggctgtggagccagtcgtcttttcccagatggagaccaagctcattacgtggggggcagacaccgccgcatgtggtgacatcatcaacgcttgcccgtctccgcccgtaggggccgagagatattgctcggaccggccgacgggatggtctctaaagggtggaggttgctggcgcctatcacggcgtacgcccagcagacaaggggcctcttggggtgcataattaccagctgaccggccgggacaaaaaccaggtggagggtgaggtccagattgtgtcaactgctgcccagaccttcctggcaacctgcatcaacggggtgtgctggactgtctaccacggagccggaacaaggacatcgcgtcacccaggggtcctgttatccagatgtacaccaatgtagaccaagacttagtaggctggcccgctccccaaggtgcccgctcattgacaccctgcacttgcggctcctcggacctttacctggtcacgaggcagccgatgtcattcccgtgcgccggcggggtgacagcagaggcagtctgctttcgcctcggcccatctcttacttaaaaggctcctcggggggcccactgctgtgccccgcgggacacgccgtaggcaattcagagccgcggtgtgcacccgtggagtggctaaggcggtggacttcatccccgtagagaacctagagacaaccatgaggtccccggtgttcacagacaactcctctccaccagcagtgccccagagcttccaggtggccacctgcatgctcccaccggcagcggtaagagcaccaaggtcccggccgcatatgctgctcagggctacaaggtgctggtgctcaacccttccgttgcagcaacattgggctttggtgcttatatgtcaaggcccatgggattgatcctaacatcaggactggggtgaggacaattactactggcagccccatcacgtactccacctatggcaagtttcttgccgacggcgggtgctcggggggtgcttatgacataataatttgtgagagtgccactccacggatgcaacatccatcttgggcatcggcaccgtccttgaccaagcagagactgcgggggcaagactggttgtgcttgccaccgccacccctccgggctccgtcaccgtgcccctcataacatcgaggaggttgctctgtccaccaccggagagatccccttctatggcaaggctattccccttgagacaatcaagggggggagacatctcatcttctgccattcaaagaagaagtgcgacgagctcgccgcgaactggccgcgttgggcgttaatgccgtggcttactaccgcggccttgacgtgtccgtcatcccgaccagtggcgatgttgtcgtcgtggcaactgatgcactcatgaccggctataccggcgactttgctcggtgatagactgcaatacgtgtgtcacccagacagtcgacttcagccttgaccctaccttcaccattgagacaaccacgcttccccaggatgctgtctcccgcactcaacgtcggggcaggactggcagggggaagccggcatctacagatttgtggcaccgggggagcgcccttccggcatgttcgactcgtccgtcctctgtgagtgctatgacgcgggctgtgcttggtatgagctcacacccgctgagaccacagttaggcacgagcgtacatgaacaccccgggactccctgtgtgccaagaccatcttgagttttgggaaggcgtcttcacgggtctcacccatatagacgcccacttcttatcccagacaaagcagagtggagaaaactttccttacctgtagcgtaccaagccaccgtgtgcgctagagcccaagcccctcccccatcgtgggaccagatgtggaagtgtttgatccgtctcaagcccacccttcatgggccaacacctctgctatacagactggcgctgttcagaatgaaatcaccctgacgcacccggtcaccaagtatatcatgacatgcatgtcg

SEQ ID NO: 649 - DNA, 4874 bp, Hepatitis C virus
acaccaaccgtcgcccacaggacgtcaagttcccgggtggcggccagatcgttggtggagtttacttgttgccgcgcaggggccctagattgggtgtgcgcgcgacgaggaagacttccgagcggtccaacctcgaggtagacgtcagcctatccccaaggcgcgtcggcccgagggcaggacctgggcccagcccgggtacccttggcccctctatggcaatgagggctgcggatgggcgggatggctcctgtcccccgtggctctcggcctagctggggccccacagacccccggcgtaggtcgcgcaatttgggtaaggtcatcgataccctcacgtgcggcttcgccgacctcatggggtacattccgctcgtcggcgcccctctcggagggctgccagggccctggcgcatggcgtccgggttctggaagacggcgtgaactatgcaacagggaaccttcctggttgctctttctctatcttccttctggccctgctctcttgcctgactgtgcccgatcagcctatcaagtacgcaactcttcgggcctctaccatgtcaccaatgattgccctaactcgagtattgtgtacgagacggccgataccatcctacactctccggggtgtgtcccttgcgttcgcgagggtaacgcctcaaatgttgggtggctgtggcccccacggtcgccaccagggacggcaagctccccgcaacgcagcttcgacgtcacatcgatctgcttgtcgggggcgccaccctctgctcggccctctacgtgggggcttgtgcgggtccatctttcttgtcggccaactgttcactttctcccccaggcgccactggacaacgcaagactgcaactgttctatctaccccggccacataacgggtcaccgcatggcatgggatatgatgatgaactgtcccctacaacagcgctggtagtagcccagctgctcagggttccacaagccatcttggatatgatcgctggtgctcactggggtgtcctagcgggcatagcgtatttttccatggtggggaactggggaaggttctggtggtgctgctgctgtttgccggcgtcgacgcgggaacctacaccaccgggggagctgttgccaggaccgcgtccacgttcgccggccttttcgatacgggcgccaagcagaatatccagctgatcaacacaacggcagttggcacatcaatcgcacggccttgaattgtaatgcgagcctcgacactggctgggtagcggggctcttctattaccaaaaattcaactcctcaggctgccccgagaggatggccagcttaagcccctcgccgatttcgaccaaggctggggccctatcagctacgccaacggaagcggccccgaacaccgcccctactgctggcactaccccccaaagccttgtggtatcgtgccagcgcagaacgtatgtggcccagttattgcttcactcctagccccgtggtggtgggaacaaccgacaagcggggtgcgcctacctacaactggggtagcaatgacacggacgtcctcgtccttaataacaccaggccaccgctgggcaattgttcggttgcacctggatgaactcatccggatttaccaaagtgtgtggagcgcctccttgtgtcatcggaggagtgggcaacaacaccttgcactgccccactgactgtttccgcaagcatccagaggccacatactctcgtgtggctccggtccctggatcacgcccaggtgcatggtccactatccttacaggctttggcattatccttgcaccgtcaactacaccgtgttcaaagtcaggatgtacgtgggaggggtcgagcacagctggaagttgcttgcaactggacgcggggcgagcgttgtgatctggacgacagggacaggtccgagctcagcccgttgctgctgtccaccacacagtggcaggtccttccatgctccttcacgaccttgccagccttgacaccggcctcatccacctccaccagaacatcgtggacgtgcaatatttgtacggggtggggtcaagcatcgtgtcctgggccatcaagtgggagtatgtcatcctcttgtttctcctgcttgcagatggcgcatctgctcctgcttgtggatgatgctactcatatcccaggcggaagcagctttggagaacctcgtggtgctcaatgcggcgtctctggccgggacgcatggtcttgtgtccttcctcgtgttcttctgctttgcatgtacctgaggggtaagtgggtgcccggagcggcctacgccttctacgggatgtggcctctcctcctgctcctgttggcgttgccccagcgggcatacgcgctagacacggagacgaccgcgtcgtgtgcggcattgttcttgtcgggttaatggcgctgactctgtcaccgcattacaagcgctatgtcagctggtgcttatggtggcttcagtatttcctgaccagagtagaagcgcaactgcacgtgtgggtcccccccctcaacgtcggggggggcgtgacgccgtcatcttactcacgtgtgtcgtacacccggccttggtatttgacatcaccaagctgctgctggccgtcttcggacccctttggattcttcaaaccagcctgctcaaaggccctacttcgtgcgcgtccaaggccttctccggatctgcgcgctagtgcgcgagatggtcggaggccattacgtgcagatggccatcatcaagatgggggcgcttactggcacctatgtttataaccatctcacccctctcgggactgggcgcacaacggcctacgagatctggccgtggctgtggagccagtcgtcttttcccagatggagaccaagctcattacgtggggggcagacaccgccgcatgtggtgacatcatcaacgcttgcccgtctccgcccgtaggggccgagagatattgctcggaccggccgacgggatggtctctaaagggtggaggttgctggcgcctatcacggcgtacgcccagcagacaaggggcctcttggggtgcataattaccagctgaccggccgggacaaaaaccaggtggagggtgaggtccagattgtgtcaactgctgcccagaccttcctggcaacctgcatcaacggggtgtgctggactgtctaccacggagccggaacaaggacatcgcgtcacccaggggtcctgttatccagatgtacaccaatgtagaccaagacttagtaggctggcccgctccccaaggtgcccgctcattgacaccctgcacttgcggctcctcggacctttacctggtcacgaggcagccgatgtcattcccgtgcgccggcggggtgacagcagaggcagtctgctttcgccccggcccatctcttacttaaaaggctcctcggggggcccactgctgtgccccgcgggacacgccgtaggcaattcagagccgcggtgtgcacccgtggagtggctaaggcggtggacttcatccccgtagagaacctagagacaaccatgaggtccccggtgttcacagacaactcctctccaccagcagtgccccagagcttccaggtggccacctgcatgctcccaccggcagcggtaagagcaccaaggtcccggccgcatatgctgctcagggctacaaggtgctggtgctcaacccttccgttgcagcaacattgggctttggtgcttatatgtcaaggcccatgggattgatcctaacatcaggactggggtgaggacaattaccactggcagccccatcacgtactccacctatggcaagtttcttgccgacggcgggtgctcggggggtgcttatgacataataatttgtgagagtgccactccacggatgcaacatccatcttgggcatcggcaccgtccttgaccaagcagagactgcgggggcaagactggttgtgcttgccaccgccacccctccgggctccgtcaccgtgcccctcataacatcgaggaggttgctctgtccaccaccggagagatccccttctatggcaaggctattccccttgagacaatcaagggggggagacatctcatcttctgccattcaaagaagaagtgcgacgagctcgccgcgaactggccgcgttgggcgttaatgccgtggcttactaccgcggccttgacgtgtccgtcatcccgaccagtggcgatgttgtcgtcgtggcaactgatgcactcatgaccggctataccggcgacttcgctcggtgatagactgcaatacgtgtgtcacccagacagtcgacttcagccttgaccctacctttaccattgagacaaccacgcttccccaggatgctgtctcccgcactcaacgtcggggcaggactggcagggggaagccggcatctacagatttgtggcaccgggggagcgcccttccggcatgttcgactcgtccgtcctctgtgagtgctatgacgcgggctgtgcttggtatgagctcacacccgctgagaccacagttaggcacgagcgtacatgaacaccccggggctccctgtgtgccaagaccatcttgagttttgggaaggcgtcttcacgggtctcacccatatagacgcccacttcttatctcagacaaagcagagtggagaaaactttccttacctgtagcgtaccaagccaccgtgtgcgctagagcccaagcccctcccccatcgtgggaccagatgtggaagtgtttgatccgtctcaagcccacccttcatgggccaacacctctgctatacagactggcgctgttcagaatgaaatcaccctgacgcacccggtcaccaagtatatcatgacatgcatgtcg

SEQ ID NO: 650 - DNA, 4874 bp, Hepatitis C virus
acaccaaccgtcgcccacaggacgtcaagttcccgggtggcggccagatcgttggtggagtttacttgttgccgcgcaggggccctagattgggtgtgcgcgcgacgaggaagacttccgagcggtccaacctcgaggtagacgtcagcctatccccaaggcgcgtcggcccgagggcaggacctgggcccagcccgggtacccttggcccctctatggcaatgagggctgcggatgggcgggatggctcctgtcccccgtggctctcggcctagctggggccccacagacccccggcgtaggtcgcgcaatttgggtaaggtcatcgataccctcacgtgcggcttcgccgacctcatggggtacattccgctcgtcggcgcccctctcggagggctgccagggccctggcgcatggcgtccgggttctggaagacggcgtgaactatgcaacagggaaccttcctggttgctctttctctatcttccttctggccctgctctcttgcctgactgtgcccgatcagcctatcaagtacgcaactcttcgggcctctaccatgtcaccaatgattgccctaactcgagtattgtgtacgagacggccgataccatcctacactctccggggtgtgtcccttgtgttcgcgagggtaacgcttcaaatgttgggtggctgtggcccccacggtcgccaccagggacggcaagctccccgcaacgcagcttcgacgtcacatcgatctgcttgtcgggggcgccaccctctgctcggccctctacgtgggggcttgtgcgggtccatctttcttgtcggccaactgttcactttctcccccaggcgccactggacaacgcaagactgcaactgttctatctaccccggccacataacgggtcaccgcatggcatgggatatgatgatgaactgtcccctacaacagcgctggtagtagcccagctgctcagggttccacaagccatcttggatatgatcgctggtgctcactggggtgtcctagcgggcatagcgtatttttccatggtggggaactggggaaggttctggtggtgctgctgctgtttgccggcgtcgatgcggcaacctacaccactgggggagctgctgccaggaccgcgtccacgttcgccggccttttcgatacgggcgccaagcagaatatccagctgatcaacacaacggcagttggcacatcaatcgcacggccttgaattgtaatgcgagcctcgacactggctgggtagcggggctcttctattaccagaaattcaactcctcaggctgccccgagaggatggccagctcaagcccctcgccgatttcgaccaaggctggggccctatcagctacgccaacggaagcggccccgaacaccgcccctactgctggcactaccccccaaagccttgtggtatcgtgccagcgcagaacgtatgtggcccagttattgcttcactcctagccccgtggtggtgggaacaaccgacaagcggggtgcgcctacctacaactggggtagcaatgacacggacgtcctcgtccttaataacaccaggccaccgctgggcaattgttcggttgcacctggatgaactcatctggatttaccaaagtgtgtggagcgcctccttgtgtcatcggaggagcgggcaacaacaccttgcactgccccactgactgtttccgcaagcatccagaggccacatactctcgtgtggctccggtccctggatcacgcccaggtgcatggtccactatccttacaggctttggcattatccttgcaccgtcaactacaccgtgttcaaagtcaggatgtacgtgggaggggtcgagcacagctggaagttgcttgcaactggacgcggggcgagcgttgtgatctggacgacagggacaggtccgagctcagcccgctgctgctgtccaccacacagtggcaggtccttccatgctccttcacgaccttgccagccttgacaccggcctcatccacctccaccagaacatcgtggacgtgcaatatttgtacggggtggggtcaagcatcgtgtcctgggccatcaagtgggagtatgtcatcctcttgtttctcctgcttgcagatggcgcatctgctcctgcttgtggatgatgctactcatatcccaggcggaagcagctttggagaacctcgtggtgctcaatgcggcgtctctggccgggacgcatggtcttgtgtccttcctcgtgttcttctgctttgcatgtacctgaggggtaagtgggtgcccggagcggcctacgccttctacgggatgtggcctctcctcctgctcctgttggcgttgccccagcgggcatacgcgctagacacggagacgaccgcgtcgtgtgcggcattgttcttgtcgggttaatggcgctgactctgtcaccgcattacaagcgctatgtcagctggtgcttatggtggcttcagtatttcctgaccagagtagaagcgcaactgcacgtgtgggtcccccccctcaacgtcggggggggcgtgacgctgtcatcttactcacgtgtgtcgtacacccggccttggtatttgacatcaccaagctgctgctggccgtcttcggacccctttggattcttcaaaccagcctgctcaaaggccctacttcgtgcgcgtccaaggccttctccggatctgcgcgctagtgcgcgagatggccggaggccattacgtgcagatggccatcatcaagatgggggcgcttactggcacctatgtttataaccatctcacccctctcgggactgggcgcacaacggcctacgagatctggccgtggctgtggagccagtcgtcttttcccagatggagaccaagctcattacgtggggggcagacaccgccgcatgtggtgacatcatcaacgcttgcccgtctccgcccgtaggggccgagagatattgctcggaccggccgacgggatggtccctaaagggtggaggttgctggcgcctatcacggcgtacgcccagcagacaaggggcctcttggggtgcataattaccagctgaccggccgggacaaaaaccaggtggagggtgaggtccagattgtgtcaactgctgcccagaccttcctggcaacctgcatcaacggggtgtgctggactgtctaccacggagccggaacaaggacatcgcgtcacccaggggtcctgttatccagatttacaccaatgtagaccaagacttagtaggctggcccgctccccaaggtgcccgctcattgacaccctgcacttgcggctcctcggacctttacctggtcacgaggcagccgatgtcattcccgtgcgccggcggggtgacagcagaggcagtctgctttcgcctcggcccatctcttacttaaaaggctcctcggggggcccactgctgtgccccgcgggacacgccgtaggcaattcagagccgcggtgtgcacccgtggagtggctaaggcggtggacttcatccccgtagagaacctagagacaaccatgaggtccccggtgttcacagacaactcctctccaccagcagtgccccagagcttccaggtggccacctgcatgctcccaccggcagcggtaagagcaccaaggtcccggccgcatatgctgctcagggctacaaggtgctggtgctcaacccttccgttgcagcaacattgggctttggtgcttatatgtcaaggcccatgggattgatcctaacatcaggactggggtgaggacaattactactggcagccccatcacgtactccacctatggcaagtttcttgccgacggcgggtgctcggggggtgcttatgacataataatttgtgagagtgccactccacggatgcaacatccatcttgggcatcggcaccgtccttgaccaagcagagactgcgggggcaagactggttgtgcttgccaccgccacccctccgggctccgtcaccgtgcccctcataacatcgaggaggttgctctgtccaccaccggagagatccccttctatggcaaggctattccccttgagacaatcaagggggggagacatctcatcttctgccattcaaagaagaagtgcgacgagctcgccgcgaactggccgcgttgggcgttaatgccgtggcttactaccgcggccttgacgtgtccgtcatcccgaccagtggcgatgttgtcgtcgtggcaactgatgcactcatgaccggctataccggcgacttcgctcggtgatagactgcaatacgtgtgtcacccagacagtcgacttcagccttgaccctaccttcaccattgagacaaccacgcttccccaggatgctgtctcccgcactcaacgtcggggcaggactggcagggggaagccggcatctacagatttgtggcaccgggggagcgcccttccggcatgttcgactcgtccgtcctctgtgagtgctatgacgcgggctgtgcttggtatgagctcacacccgctgagaccacagttaggcacgagcgtacatgaacaccccgggactccctgtgtgccaagaccatcttgagttttgggaaggcgtcttcacgggtctcacccatatagacgcccacttcttatcccagacaaagcagagtggagaaaactttccttacctgtagcgtaccaagccaccgtgtgcgctagagcccaagcccctcccccatcgtgggaccagatgtggaagtgtttgatccgtctcaagcccacccttcatgggccaacacctctgctatacagactggcgctgttcagaatgaaatcaccctgacgcacccggtcaccaagtatatcatgacatgcatgtcg

SEQ ID NO: 651 - DNA, 4874 bp, Hepatitis C virus
acaccaaccgtcgcccacaggacgtcaagttcccgggtggcggccagatcgttggtggagtttacttgttgccgcgcaggggccctagattgggtgtgcgcgcgacgaggaagacttccgagcggtccaacctcgaggtagacgtcagcctatccccaaggcgcgtcggcccgagggcaggacctgggcccagcccgggtacccttggcccctctatggcaatgagggctgcggatgggcgggatggctcctgtcccccgtggctctcggcctagctggggccccacagacccccggcgtaggtcgcgcaatttgggtaaggtcatcgataccctcacgtgcggcttcgccgacctcatggggtacattccgctcgtcggcgcccctctcggagggctgccagggccctggcgcatggcgtccgggttctggaagacggcgtgaactatgcaacagggaaccttcctggttgctctttctctatcttccttctggccctgctctcttgcctgactgtgcccgatcagcctatcaagtacgcaactcttcgggcctctaccatgtcaccaatgattgccctaactcgagtattgtgtacgagacggccgataccatcctacactctccggggtgcgtcccttgcgttcgcgaggttaacgcctcaaatgttgggtggctgtggcccccacggtcgccaccagggacggcaagctccccgcaacgcagcttcgacgtcacatcgatctgcttgtcgggggcgccaccctctgctcggccctctacgtgggggcttgtgcgggtccatctttcttgtcggccaactgttcactttctcccccaggcgccactggacaacgcaagactgcaactgttctatctaccccggccacataacgggtcaccgcatggcatgggatatgatgatgaactgtcccctacaacagcgctggtagtagcccagctgctcagggttccacaagccatcttggatatgatcgctggtgctcactggggtgtcctagcgggcatagcgtatttttccatggtggggaactggggaaggttctggtggtgctgctgctgtttgccggcgtcgacgcgggaacctacaccaccgggggagctgctgccaggaccgcgtccacgttcgccggccttttcgatacgggcgccaagcagaatatccagctgatcaacacaacggcagttggcacatcaatcgcacggccttgaattgtaatgcgagcctcgacactggctgggtagcggggctcttctattaccaaaaattcaactcctcaggctgccccgagaggatggccagcttaagcccctcgccgatttcgaccaaggctggggccctatcagctacgccaacggaagcggccccgaacaccgcccctactgctggcactaccccccaaagccttgtggtgtcgtgccagcgcagaaagtatgtggcccagttattgcttcactcctagccccgtggtggtgggaacaaccgacaagcggggtgcgcctacctacaactggggtagcaatgacacggacgtcctcgtccttaataacaccaggccaccgctgggcaattgttcggttgcacctggatgaactcatccggatttaccaaagtgtgtggagcgcctccttgtgtcatcggaggagtgggcaacaacaccttgcactgccccactgactgtttccgcaagcatccagaggccacatactctcgtgtggctccggtccctggatcacgcccaggtgcatggtccactatccttacaggctttggcattatccttgcaccgtcaactacaccgtgttcaaagtcaggatgtacgtgggaggggtcgagcacagctggaagttgcttgcaactggacgcggggcgagcgttgtgatctggacgacagggacaggtccgagctcagcccgctgctgctgtccaccacacagtggcaggtccttccatgctccttcacgaccttgccagccttgacaccggcctcatccacctccaccagaacatcgtggacgtgcaatatttgtacggggtggggtcaagcatcgtgtcctgggccatcaagtgggagtatgtcatcctcttgtttctcctgcttgcagatggcgcatctgctcctgcttgtggatgatgctactcatatcccaggcggaagcagctttggagaacctcgtggtgctcaatgcggcgtctctggccgggacgcatggtctcgtgtccttcctcgtgttcttctgctttgcatgtacctgaggggtaagtgggtgcccggagcggcctacgccttctacgggatgtggcccctcctcctgctcctgttggcgttgccccagcgggcatacgcgctagacacggagacgaccgcgtcgtgtgcggcattgttcttgtcgggttaatggcgctgactctgtcaccgcattacaagcgctatgtcagctggtgcttatggtggcttcagtatttcctgaccagagtagaagcgcaactgcacgtgtgggtcccccccctcaacgtcggggggggcgtgacgctgtcatcttactcacgtgtgtcgtacacccggccttggtatttgacatcaccaagctgctgctggccgtcttcggacccctttggattcttcaaaccagcctgctcaaaggccctacttcgtgcgcgtccaaggccttctccggatctgcgcgctagtgcgcgagatggccggaggccattacgtgcagatggccatcatcaagatgggggcgcttactggcacctatgtttataaccatctcacccctctcgggactgggcgcacaacggcctacgagatctggccgtggctgtggagccagtcgtcttttcccagatggagaccaagctcattacgtggggggcagacaccgccgcatgtggtgacatcatcaacgcttgcccgtctccgcccgtaggggccgagagatattgctcggaccggccgacgggatggtctctaaagggtggaggttgctggcgcctatcacggcgtacgcccagcagacaaggggcctcttggggtgcataattaccagctgaccggccgggacaaaaaccaggtggagggtgaggtccagattgtgtcaactgctgcccagaccttcctggcaacctgcatcaacggggtgtgctggactgtctaccacggagccggaacgaggacatcgcgtcacccaggggtcctgttatccagatgtacaccaatgtagaccaagacttagtaggctggcccgctccccaaggtgcccgctcattgacaccctgcacttgcggctcctcggacctttacctggtcacgaggcagccgatgtcattcccgtgcgccggcggggtgacagcagaggcagtctgctttcgccccggcccatctcttacttaaaaggctcctcggggggcccactgctgtgccccgcgggacacgccgtaggcaattcagagccgcggtgtgcacccgtggagtggctaaggcggtggacttcatccccgtagagaacctagagacaaccatgaggtccccggtgttcacagacaactcctctccaccagcagtgccccagagcttccaggtggccacctgcatgctcccaccggcagcggtaagagcaccaaggtcccggccgcatatgctgctcagggctacaaggtgctggtgctcaacccttccgttgcagcaacattgggctttggtgcttatatgtcaaggcccatgggattgatcctaacatcaggactggggtgaggacaattaccactggcagccccatcacgtactccacctatggcaagtttcttgccgacggcgggtgctcggggggtgcttatgacataataatttgtgagagtgccactccacggatgcaacatccatcttgggcatcggcaccgtccttgaccaagcagagactgcgggggcaagactggttgtgcttgccaccgccacccctccaggctccgtcaccgtgcccctcataacatcgaggaggttgcgctgtccaccaccggagagatccccttctatggcaaggctattccccttgagacaatcaagggggggagacatctcatcttctgccattcaaagaagaagtgcgacgagctcgccgcgaactggccgcgttgggcgttaatgccgtggcttactaccgcggccttgacgtgtccgtcatcccgaccagtggcgatgttgtcgtcgtggcaactgatgcactcatgaccggctataccggcgacttcgctcggtgatagactgcaatacgtgtgtcacccagacagtcgacttcagccttgaccctaccttcaccattgagacaaccacgcttccccaggatgctgtctcccgcactcaacgtcggggcaggactggcagggggaagccggcatctacagatttgtggcaccgggggagcgcccttccggcatattcgactcgtccgtcctctgtgagtgctatgacgcgggctgtgcttggtatgagctcacacccgctgagaccacagttaggcacgagcgtacatgaacaccccgggactccctgtgtgccaagaccatcttgagttttgggaaggcgtcttcacgggtctcacccatatagacgcccacttcttgtcccagacaaagcagagtggagaaaactttccttacctgttgcgtaccaagccaccgtgtgcgctagagcccaagcccctcccccatcgtgggaccagatgtggaagtgtttgatccgtctcaagcccacccttcatgggccaacacctctgctatacagactggcgctgttcagaatgaaatcaccctgacgcacccggtcaccaagtatatcatgacatgcatgtcg

SEQ ID NO: 652 - DNA, 4874 bp, Hepatitis C virus
acaccaaccgtcgcccacaggacgtcaagttcccgggtggcggccagatcgttggtggagtttacttgttgccgcgcaggggccctagattgggtgtgcgcgcgacgaggaagacttccgagcggtccaacctcgaggtagacgtcagcctatccccaaggcgcgtcggcccgagggcaggacctgggcccagcccgggtacccttggcccctctatggcaatgagggctgcggatgggcgggatggctcctgtcccccgtggctctcggcctagctggggccccacagacccccggcgtaggtcgcgcaatttgggtaaggtcatcgataccctcacgtgcggcttcgccgacctcatggggtacattccgctcgtcggcgcccctctcggagggctgccagggccctggcgcatggcgtccgggttctggaagacggcgtgaactatgcaacagggaaccttcctggttgctctttctctatcttccttctggccctgctctcttgcctgactgtgcccgatcagcctatcaagtacgcaactcttcgggcctctaccatgtcaccaatgattgccctaactcgagtattgtgtacgagacggccgataccatcctacactctccggggtgtgtcccttgcgttcgcgagggtaacgcctcaaatgttgggtggctgtggcccccacggtcgccaccagggacggcaagctccccgcaacgcagcttcgacgtcacatcgatctgcttgtcgggggcgccaccctctgctcggccctctacgtgggggcttgtgcgggtccatctttcttgtcggccaactgttcacgttctcccccaggcgccactggacaacgcaagactgcaactgttctatctaccccggccacataacgggtcatcgcatggcatgggatatgatgatgaactgtcccctacaacagcgctggtagtagcccagctgctcagggttccacaagccatcttggatatgatcgctggtgctcactggggtgtcctagcgggcatagcgtatttttccatggtggggaactggggaaggttctggtggtgctgctgctgtttgccggcgtcgatgcggcaacctacaccaccgggggagctgctgccaggaccgcgtccacgttcgccggccttttcgatacgggcgccaagcagaatatccagctgatcaacacaacggcagttggcacatcaatcgcacggccttgaattgtaatgcgagcctcgacactggctgggtagcggggctcttctattaccaaaaattcaactcctcaggctgccccgagaggatggccagcttaagcccctcgccgatttcgaccaaggctggggccctatcagctacgccaacggaagcggccccgaacaccgcccctactgctggcactaccccccaaagccttgtggtatcgtgccagcgcagaacgtatgtggcccagttattgcttcactcctagccccgtggtggtgggaacaaccgacaagcggggtgcgcctacctacaactggggtggcaatgacacggacgtcctcgtccttaataacaccaggccaccgctgggcaattgttcggttgcacctggatgaactcatctggatttaccaaagtgtgcggagcgcctccttgtgtcatcggaggagtgggcaacaacaccttgcactgccccactgactgtttccgcaagcatccagaggccacatactctcgtgtggctccggtccctggatcacgcccaggtgcatggtccactatccttacaggctttggcattatccttgcaccgtcaactacaccgtgttcaaagtcaggatgtacgtgggaggggtcgagcacagctggaagttgcttgcaactggacgcggggcgagcgttgtgatctggacgacagggacaggtccgagctcagcccgctactgctgtccaccacacagtggcaggtccttccatgctccttcacgaccttgccagccttgacaccggcctcatccacctccaccagaacatcgtggacgtgcaatatttgtacggggtggggtcaagcatcgtgtcctgggccatcaagtgggagtatgtcatcctcttgtttctcctgcttgcagatggcgcatctgctcctgcttgtggatgatgctactcatatcccaggcggaagcagctttggagaacctcgtggtgctcaatgcggcgtctctggccgggacgcatggtcttgtgtccttcctcgtgttcttctgctttgcatgtacctgaggggtaagtgggtgcccggagcggcctacgccttctacgggatgtggcctctcctcctgctcctgttggcgttgccccagcgggcatacgcgctagacacggagacgaccgcgtcgtgtgcggcattgttcttgtcgggttaatggcgctgactctgtcaccgcattacaagcgctatgtcagctggtgcttatggtggcttcagtatttcctgaccagagtagaagcgcaactgcacgtgtgggtcccccccctcaacgtcggggggggcgtgacgctgtcatcttactcacgtgtgtcgtacacccggccttggtatttgacatcaccaagctgctgctggccgtcttcggacccctttggattcttcaaaccagcctgctcaaaggccctacttcgtgcgcgtccaaggccttctccggatctgcgcgctagtgcgcgagatggccggaggccattacgtgcagatggccatcatcaagatgggggcgcttactggcacctatgtttataaccatctcacccctctcgggactgggcgcacaacggcctacgagatctggccgtggctgtggagccagtcgtcttttcccagatggagaccaagctcattacgtggggggcggacaccgccgcatgtggtgacatcatcaacgcttgcccgtctccgcccgtaggggccgagagatattgctcggaccggccgacgggatggtctctaaagggtggaggttgctggcgcctatcacggcgtacgcccagcagacaaggggcctcttggggtgcataattaccagctgaccggccgggacaaaaaccaggtggagggtgaggtccagattgtgtcaactgctgcccagaccttcctggcaacctgcatcaacggggtgtgctggactgtctaccacggagccggaacaaggacatcgcgtcacccaggggtcctgttatccagatgtacaccaatgtagaccaagacttagtaggctggcccgctccccaaggtgcccgctcattgacaccctgcacttgcggctcctcggacctttacctggtcacgaggcagccgatgtcattcccgtgcgccggcggggtgacagcagaggcagtctgctttcgccccggcccatctcttacttaaaaggctcctcggggggcccactgctgtgccccgcgggacacgccgtaggcaattcagagccgcggtgtgcacccgtggagtggctaaggcggtggacttcatccccgtagagaacctagagacaaccatgaggtccccggtgttcacagacaactcctctccaccagcagtgccccagagcttccaggtggccacctgcatgctcccaccggcagcggtaagagcaccaaggtcccggccgcatatgctgctcagggctacaaggtgctggtgctcaacccttccgttgcagcaacattgggctttggtgcttatatgtcaaggcccatgggattgatcctaacatcaggactggggtgaggacaattaccactggcagccccatcacgtactccacctatggcaagtttcttgccgacggcgggtgctcggggggtgcttatgacataataatttgtgagagtgccactccacggatgcaacatccatcttgggcatcggcaccgtccttgaccaagcagagactgcgggggcaagactggttgtgcttgccaccgccacccctccgggctccgtcactgtgcccctcataacatcgaggaggttgctctgtccaccaccggagagatccccttctatggcaaggctattccccttgagacaatcaagggggggagacatctcatcttctgccattcaaagaagaagtgcgacgagctcgccgcgaactggccgcgttgggcgttaatgccgtggcttactaccgcggccttgacgtgtccgtcatcccgaccagtggcgatgttgtcgtcgtggcaactgatgcactcatgaccggctataccggcgacttcgctcggtgatagactgcaatacgtgtgtcacccagacagtcgacttcagccttgaccctaccttcaccattgagacaaccacgcttccccaggatgctgtctcccgcactcaacgtcggggcaggactggcagggggaagccggcatctacagatttgtggcaccgggggagcgcccttccggcatgttcgactcgtccgtcctctgtgagtgctatgacgcgggctgtgcttggtatgagctcacacccgctgagaccacagttaggcacgagcgtacatgaacaccccgggactccctgtgtgccaagaccatcttgagttttgggaaggcgtcttcacgggtctcacccatatagacgcccacttcttatcccagacaaagcagagtggagaaaactttccttacctgtagcgtaccaagccaccgtgtgcgctagagcccaagcccctcccccatcgtgggaccagatgtggaagtgtttgatccgtctcaagcccaccctgcatgggccaacacctctgctatacagactggcgctgttcagaatgaaatcaccctgacgcacccggtcaccaagtatatcatgacatgcatgtcg

SEQ ID NO: 653 - DNA, 4874 bp, Hepatitis C virus
acaccaaccgtcgcccacaggacgtcaagttcccgggtggcggccagatcgttggtggagtttacttgttgccgcgcaggggccctagattgggtgtgcgcgcgacgaggaagacttccgagcggtccaacctcgaggtagacgtcagcctatccccaaggcgcgtcggcccgagggcaggacctgggcccagcccgggtacccttggcccctctatggcaatgagggctgcggatgggcgggatggctcctgtcccccgtggctctcggcctagctggggccccacagacccccggcgtaggtcgcgcaatttgggtaaggtcatcgataccctcacgtgcggcttcgccgacctcatggggtacattccgctcgtcggcgcccctctcggagggctgccagggccctggcgcatggcgtccgggttctggaagacggcgtgaactatgcaacagggaaccttcctggttgctctttctctatcttccttctggccctgctctcttgcctgactgtgcccgatcagcctatcaagtacgcaactcttcgggcctctaccatgtcaccaatgattgccctaactcgagtattgtgtacgagacggccgataccatcctacactctccggggtgtgtcccttgcgttcgcgagggtaacgcctcaaatgttgggtggctgtggcccccacggtcgccaccagggacggcaagctccccgcaacgcagcttcgacgtcacatcgatctgcttgtcgggggcgccaccctctgctcggccctctacgtgggggcttgtgcgggtccatctttcttgtcggccaactgttcacgttctcccccaggcgccactggacaacgcaagactgcaactgttctatctaccccggccacataacgggtcatcgcatggcatgggatatgatgatgaactgtcccctacaacagcgctggtagtagcccagctgctcagggttccacaagccatcttggatatgatcgctcgtgctcactggggtgtcctagcgggcatagcgtatttttccatggtggggaactggggaaggttctggtggtgttgctgctgtttgccggcgtcgatgcggcaacctacaccaccgggggagctgctgccaggaccgcgtccacgttcgccggccttttcgatacgggcgccaagcagaatatccagctgatcaacacaacggcagttggcacatcaatcgcacggccttgaattgtaatgcgagcctcgacactggctgggtagcggggctcttctattaccaaaaattcaactcctcaggctgccccgagaggatggccagcttaagcccctcgccgatttcgaccaaggctggggccctatcagctacgccaacggaagcggccccgaacaccgcccctactgctggcactaccccccaaagccttgtggtatcgtgccagcgcagaacgtatgtggcccagttattgcttcactcctagccccgtggtggtgggaacaaccgacaagcggggtgcgcctacctacaactggggtggcaatgacacggacgtcctcgtccttaataacaccaggccaccgctgggcaattgttcggttgcacctggatgaactcatctggatttaccaaagtgtgcggagcgcctccttgtgtcatcggaggagtgggcaacaacaccttgcactgccccactgactgtttccgcaagcatccagaggccacatactctcgtgtggctccggtccctggatcacgcccaggtgcatggtccactatccttacaggctttggcattatccttgcaccgtcaactacaccgtgttcaaagtcaggatgtacgtgggaggggtcgagcacagctggaagttgcttgcaactggacgcggggcgagcgttgtgatctggacgacagggacaggtccgagctcagcccgctactgctgtccaccacacagtggcaggtccttccatgctccttcacgaccttgccagccttgacaccggcctcatccacctccaccagaacatcgtggacgtgcaatatttgtacggggtggggtcaagcatcgtgtcctgggccatcaagtgggagtatgtcatcctcttgtttctcctgcttgcagatggcgcatctgctcctgcttgtggatgatgctactcatatcccaggcggaagcagctttggagaacctcgtggtgctcaatgcggcgtctctggccgggacgcatggtcttgtgtccttcctcgtgttcttctgctttgcatgtacctgaggggtaagtgggtgcccggagcggcctacgccttctacgggatgtggcctctcctcctgctcctgttggcgttgccccagcgggcatacgcgctagacacggagacgaccgcgtcgtgtgcggcattgttcttgtcgggttaatggcgctgactctgtcaccgcattacaagcgctatgtcagctggtgcttatggtggcttcagtatttcctgaccagagtagaagcgcaactgcacgtgtgggtcccccccctcaacgtcggggggggcgtgacgctgtcatcttactcacgtgtgtcgtacacccggccttggtatttgacatcaccaagctgctgctggccgtcttcggacccctttggattcttcaaaccagcctgctcaaaggccctacttcgtgcgcgtccaaggccttctccggatctgcgcgctagtgcgcgagatggccggaggccattacgtgcagatggccatcatcaagatgggggcgcttactggcacctatgtttataaccatctcacccctctcgggactgggcgcacaacggcctacgagatctggccgtggctgtggagccagtcgtcttttcccagatggagaccaagctcattacgtggggggcggacaccgccgcatgtggtgacatcatcaacgcttgcccgtctccgcccgtaggggccgagagatattgctcggaccggccgacgggatggtctctaaagggtggaggttgctggcgcctatcacggcgtacgcccagcagacaaggggcctcttggggtgcataattaccagctgaccggccgggacaaaaaccaggtggagggtgaggtccagattgtgtcaactgctgcccagaccttcctggcaacctgcatcaacggggtgtgctggactgtctaccacggagccggaacaaggacatcgcgtcacccaggggtcctgttatccagatgtacaccaatgtagaccaagacttagtaggctggcccgctccccaaggtgcccgctcattgacaccctgcacttgcggctcctcggacctttacctggtcacgaggcagccgatgtcattcccgtgcgccggcggggtgacagcagaggcagtctgctttcgccccggcccatctcttacttaaaaggctcctcggggggcccactgctgtgccccgcgggacacgccgtaggcaattcagagccgcggtgtgcacccgtggagtggctaaggcggtggacttcatccccgtagagaacctagagacaaccatgaggtccccggtgttcacagacaactcctctccaccagcagtgccccagagcttccaggtggccacctgcatgctcccaccggcagcggtaagagcaccaaggtcccggccgcatatgctgctcagggctacgaggtgctggtgctcaacccttccgttgcagcaacattgggctttggtgcttatatgtcaaggcccatgggattgatcctaacatcaggactggggtgaggacaattaccactggcagccccatcacgtactccacctatggcaagtttcttgccgacggcgggtgctcggggggtgcttatgacataataatttgtgagagtgccactccacggatgcaacatccatcttgggcatcggcaccgtccttgaccaagcagagactgcgggggcaagactggttgtgcttgccaccgccacccctccgggctccgtcaccgtgcccctcataacatcgaggaggttgctctgtccaccaccggagagatccccttctatggcaaggctattccccttgagacaatcaagggggggagacatctcatcttctgccattcaaagaagaagtgcgacgagctcgccgcgaactggccgcgttgggcgttaatgccgtggcttactaccgcggccttgacgtgtccgtcatcccgaccagtggcgatgttgtcgtcgtggcaactgatgcactcatgaccggctataccggcgacttcgctcggtgatagactgcaatacgtgtgtcacccagacagtcgacttcagccttgaccctaccttcaccattgagacaaccacgcttccccaggatgctgtctcccgcactcaacgtcggggcaggactggcagggggaagccggcatctacagatttgtggcaccgggggagcgcccttccggcatgttcgactcgtccgtcctctgtgagtgctatgacgcgggctgtgcttggtatgagctcacacccgctgagaccacagttaggcacgagcgtacatgaacaccccgggactccctgtgtgccaagaccatcttgagttttgggaaggcgtcttcacgggtctcacccatatagacgcccacttcttatcccagacaaagcagagtggagaaaactttccttacctgtagcgtaccaagccaccgtgtgcgctagagcccaagcccctcccccatcgtgggaccagatgtggaagtgtttgatccgtctcaagcccaccctgcatgggccaacacctctgctatacagactggcgctgttcagaatgaaatcaccctgacgcacccggtcaccaagtatatcatgacatgcatgtcg

SEQ ID NO: 654 - DNA, 4875 bp, Hepatitis C virus
acaccaaccgtcgcccacaggacgtcaagttcccgggtggcggccagatcgttggtggagtttacttgttgccgcgcaggggccctagattgggtgtgcgcgcgacgaggaaggcttccgagcggtccaacctcgaggtagacgtcagcctatccccaaggcgcgtcggcccgagggcaggacctgggcccagcccgggtacccttggcccctctatggcaatgagggctgcggatgggcgggatggctcctgtcccccgtggctctcggcctagctggggccccacagacccccggcgtaggtcgcgcaatttgggtaaggtcatcgataccctcacgtgcggcttcgccgacctcatggggtacattccgctcgtcggcgcccctctcggagggctgccagggccctggcgcatggcgtccgggttctggaagacggcgtgaactatgcaacagggaaccttcctggttgctctttctctatcttccttctggccctgctctcttgcctgactgtgcccgatcagcctatcaagtacgcaactcttcgggcctctaccatgtcaccaatgattgccctaactcgagtattgtgtacgagacggccgataccatcctacactctccggggtgcgtcccttgcgttcgcgagggtaacgcctcaaatgttgggtggctgtggcccccacggtcgccaccagggacggcaagctccccgcaacgcagcttcgacgtcacatcgatctgcttgtcgggggcgccaccctctgctcggccctctacgtgggggcttgtgcgggtccatctttcttgtcggccaactgttcactttctcccccaggcgccactggacaacgcaagactgcaactgttctatctaccccggccacataacgggtcaccgcatggcatgggatatgatgatgaactgtcccctacaacagcgctggtagtagcccagctgctcagggttccacaagccatcttggatatgatcgctggtgctcactggggtgtcctagcgggcatagcgtatttttccatggtggggaactggggaaggttctggtggtgctgctgctgtttgccggcgtcgacgcgggaacctacaccaccgggggagctgctgccaggaccgcgtccacgttcgccggccctttcgatacgggcgccaagcagaatatccagctgatcaacacaacggcagttggcacatcaatcacacggccttgaattgtaatgcgagcctcgacactggctgggtagcggggctcttctattaccaaaaattcaactcctcaggctgccccgagaggatggccagcttaagcccctcgccgatttcgaccaaggctggggccctatcagctacgccaacggaagcggccccgaacaccgcccctactgctggcactaccccccaaagccttgtggtgtcgtgccagcgcagaaagtatgtggcccagttattgcttcactcctagccccgtggtggtgggaacaaccgacaagcggggtgcgcctacctacaactggggtagcaatgacacggacgtcctcgtccttaataacaccaggccaccgctgggcaattgttcggttgcacctggatgaactcatccggatttaccaaagtgtgtggagcgcctccttgtgtcatcggaggagtgggcaacaacaccttgcactgccccactgactgtttccgcaagcatccagaggccacatactctcgtgtggctccggtccctggatcacgcccaggtgcatggtccactatccttacaggctttggcattatccttgcaccgtcaactacaccgtgttcaaagtcaggatgtacgtgggaggggtcgagcacagctggaagttgcttgcaactggacgcggggcgagcgttgtgatctggacgacagggacaggtccgagctcagcccgctgctgctgtccaccacacagtggcaggtccttccatgctccttcacgaccttgccagccttgacaccggcctcatccacctccaccagaacatcgtggacgtgcaatatttgtacggggtggggtcaagcatcgtgtcctgggccatcaagtgggagtatgtcatcctcttgtttctcctgcttgcagatggcgcatctgctcctgcttgtggatgatgctactcatatcccaggcggaagcagctttggagaacctcgtggtgctcaatgcggcgtctctggccgggacgcatggtctcgtgtccttcctcgtgttcttctgctttgcatgtacctgaggggtaagtgggtgcccggagcggcctacgccttctacgggatgtggcccctcctcctgctcctgttggcgttgccccagcgggcatacgcgctagacacggagacgaccgcgtcgtgtgcggcattgttcttgtcgggttaatggcgctgactctgtcaccgcattacaagcgctatgtcagctggtgcttatggtggcttcagtatttcctgaccagagtagaagcgcaactgcacgtgtgggtccccccccctcaacgccggggggggcgtgacgctgtcatcttactcacgtgtgtcgtacacccggccttggtatttgacatcaccaagctgctgctggccgtcttcggacccctttggattcttcaaaccagcctgctcaaatgccctacttcgtgcgcgtccaaggccttctccggatctgcgcgctagtgcgcgagatggccggaggccattacgtgcagatggccatcatcaagatgggggcgcttactggcacctatgtttataaccatctcacccctctcgggactgggcgcacaacggcctacgagatctggccgtggctgtggagccagtcgtcttttcccagatggagaccaagctcattacgtggggggcagacaccgccgcatgtggtgacatcatcaacgcttgcccgtctccgcccgtaggggccgagagatattgctcggaccggccgacgggatggtctctaaagggtggaggttgctggcgcctatcacggcgtacgcccagcagacaaggggcctcttggggtgcataattaccacctgaccggccgggacaaaaaccaggtggagggtgaggtccagattgtgtcaactgctgcccagaccttcctggcaacctgcatcaacggggtgtgctggactgtctaccacggagccggaacgaggccatcgcgtcacccaggggtcctgttatccagatgtacaccaatgtagaccaagacttagtaggctggcccgctccccaaggtgcccgctcattgacaccctgcacttgcggctcctcggacctttacctggtcacgaggccgccgatgtcattcccgtgcgccggcggggtgacagcagaggcagtctgctttcgccccggcccatctcttacttaaaaggctcctcggggggcccactgctgtgccccgcgggacacgccgtaggctattcagagccgcggtgtgcacccgtggagtggctaaggcggtggacttcatccccgtagagaacctagagacaaccatgaggtccccggtgttcacagacaactcctctccaccagcagtgccccagagcttccaggtggccacctgcatgctcccaccggcagcggtaagagcaccaaggtcccggccgcatatgctgctcagggctacaaggtgctggtgctcaacccttccgttgcagcaacattgggctttggtgcttatgtgccaaggcccatgggattgatcctaacatcaggactggggtgaggacaattaccactggcagccccatcacgtactccacctatggcaagtttcttgccgacggcgggtgctcggggggtgcttatgacataataatttgtgcgagtgccactccacggatgcaacatccatcttgggcatcggcaccgtccttgaccaagcagagactgcgggggcaagactggttgtgcttgccaccgccacccctccaggctccgtcaccgtgcccatcataacatcgaggaggttgcgctgtccaccaccggagagatccccttctatggcaaggctattccccttgagacaatcaagggggggagacatctcatcttctgccattcaaagaagaagtgcgacgagctcgccgcgaactggccgcgttgggcgttaatgccgtggcttactaccgcggccttgacgtgtccgtcatcccgaccagtggcgatgttgtcgtcgtggcaactgatgcactcatgaccggctataccggcgacttcactcggtgatagactgcaatacgtgtgtcacccagacagtcgacttcagccttgaccctaccttcaccattgagacaaccacgcttccccaggatgctgtctcccgcactcaacgtcggggcaggactggcagggggaagcaggcatctacagatttgtggcaccgggggagcgcccttccggcatgttcgactcgtccgtcctctgtgagtgctatgacgcgggctgtgcttggtatgagctcacacccgctgagaccacagttaggtacgagcgtacatgaacaccccgggactccctgtgtgccaagaccatcttgagttttgggaaggcgtcttcacgggtctcacccatatagacgcccacttcttgtcccagacaaagcagaatggagaaaactttccttaccggttgcgtaccaagccaccgtgtgcgctagagcccaagcccctcccccatcgtgggaccagatgtggaagtgtttgatccgtctcaagcccacccttcatgggccaacacctctgctatacagactggcgctgttcagaatgaaatcaccctgacgcacccggtcaccaagtatatcatgacatgcatgtcg

SEQ ID NO: 655 - DNA, 3562 bp, Hepatitis C virus
aacaccaaccgtcgcccacaggacgtcaagttcccgggtggcggtcagatcgttggtggagtttacttgttgccgcgcaggggccctagattgggtgtgcgcgcgacgaggaagacttcggagcggtgcaacctcgaggtagacgtcagcctatccccaaggcgcgtcggcccgagggcaggacctgggctcagcccgggtatccttggcccctctatggcaatgagggctgcgggtgggcgggatggctcctgctccccgtggctctcggcctagctggggccccacagacccccggcgtaggtcgcgcaatttgggtaaggtcatcgatacccttacgtgcggcttcgccgacctcatggggtacataccgctcgtcggcgcccctcttggagcgctgccagggccctggcgcatggcgtccgggttctggaagacggcgtgaactatgcaacagggaaccttcctggttgctctttctctatcttccttttggccctgctctcttgcctgactgtgccccttcggcctaccaagtgcgcaactccacggggctctaccatgtcaccaatgattgccctaactcgagtattgtgtacgaggcggctgatgccatcctgcacattccggggtgtgtcccttgcgttcgcgagggtaacgcctgaggtgttgggtgtcgataacccccacggtggccaccagggacggcaaactccccacgacgcaactacgacgtcacatcgatctgcttgttgggagcgccaccctttgttcggccctctacgtggggacctgtgcgggtctgtctttcttgtcggtcagctgttcaccttctctccgaggctccactggacgacgcagggctgcaattgttccatctatcccggccatataacgggtcaccgcatggcatgggatatgatgatgaactgtcccctacgacggcattggtagtagctcagctgctccggatcccacaagccatcttggacatgatcgctggtgctcactggggagtcctggcgggcatagcgtatttctccatggtggggaactggcgaaggtcctggtagtgctgctgctatttgccggcgttgacgcgaccacccacgtcaccgggggaagcgtcgcccgcactacgtctagttttgctaacctcctcacatcaggtgccaagcagaacatccagctgatcaacacaacggcagttggcacatcaataggacggccttgaactgcaatgatagcctcaacaccggctggatagcagggcttttctattacatcaccaaacagctgctggccgtcttcggacccctttggatttccaagccagtctgcttaagatcccctacttcgtgcgcgttcagggccttctccggatctgcgcgttggcgcggaggatggtcggaggccactacgtgcaaatggccatcatcaagttgggggcgcttactggcacctatgttataaccatctcactccccttcgggactgggcgcacaacggcctgcgagatctggccgtggctgtagagccagtcgtcttctcccggatggagaccaagctcatcacgtggggggcagacaccgcccgtgcggtgacatcatcaacggcttgcccgtctccgcccgtaagggccgggagatactgctcgggccagctgacggaatggtctccaagggttggagattgctggcgcccatcacagcgtacgcccagcaaacaaggggcccctagggtgtataatcaccagcctgactggccgggacaaaaaccaagcagagggtgaggtccagattgtgtcaactgctacccaaactttcttggcaacgtgcatcaatggggtatgctggactgtcaccacggggccgggacgaggaccatcgcatcacccaagggtcctgtcattcagatgtacaccaatgtagaccaggaccttgtgggctggcccgcccctcaaggtacccgctcattggcaccctgcacctgcggctcctcggcctttacctggtcacgaggcacgccgatgtcatccccgtgcgcaggcggggtgatagcaggggcagcttgctttcgccccggcccatctcttacttgaaaggctcctcagggggtccgctgttgtgcccgcgggacacgccgtaggcatattcagggccgcggtgtgcacccgtggagtggctaaggcggtggactttatccctgtggagaacctagagacaaccatgaggtccccggtgtttacggacaactcctccccaccagcaggccccagagcttccaagtggcccacctgcatgctcccacaggcagcggcaagagcaccaaggtcccggctgcatatgcagcccagggctacaaggtgctagtgctcaacccttctgtcgctgcaacatgggctttggtgcttacatgtccaaggctcatggggtcgatcctaacatcaggaccggggtgagaacaattaccactggcagccccatcacgtactccacctacggcaagttccttgccgacggcgggtgctcagggggtgttatgacataataatttgtgacgagtgccactccacggatgccacatctatcttgggcatcggcactgtccttgatcaagcagagactgcgggggcgagactggttgtgctcgccaccgctacccctcgggctccatcactgtgccccatcccaatatcgaggaggttgctctgtccaccaccggagagatccctttctacggcaaggctatccccctcgaagtgatcaagggggggagacatctcatcttctgccactcaaagaggaatgcgacgagctcgccgcaaagctggtcgcattgggcatcaatgccgtggcttactaccgcggtcttgacgtgtctgtcattccgaccagcggcgatgttgtcgtcgtggcaactgatgctctcatgccggctataccggcgacttcgactcggtgatagactgcaacacgtgtgtcacccagacagtcgatttcagccttgaccctaccttcaccattgagacaaccacgcttccccaggatgccgtctcccgcactcaacgtcgggcaggactggcagggggaagtcaggcatctacaggtttgtggcaccgggggagcgcccctccggtatgttcgactcgtccgtcctctgtgagtgctatgacgcgggctgtgcttggtatgagctcacgccgccgagactacagttaggctacgagcgtacatgaacaccccggggcttcccgtgtgccaggaccatcttgagttttgggagggcgtctttacgggcctcacccatatagacgcccacttcctatctcagacaaagcagatggggaaaactttccttacctggtagcgtaccaagccaccgtgtgcgctagggctcaagcccctcccccatcgtgggaccagatgtggaagtgtttgatccgcctcaaacccaccctcaatgggccacacccctgctatacagactgggcgctgttcagaatgaaatcaccctgacgcacccaatcaccaagtacatcatgacatgtatgtcggctgac

SEQ ID NO: 656 - DNA, 4881 bp, Hepatitis C virus
aacaccaaccgtcgcccacaggacgtcaagttcccgggtggcggtcagatcgttggtggagtttacttgttgccgcgcaggggccctagattgggtgtgcgcgcgacgaggaagacttcggagcggtgcaacctcgaggtagacgtcagcctatccccaaggcgcgtcggcccgagggcaggacctgggctcagcccgggtatccttggcccctctatggcaatgagggctgcgggtgggcgggatggctcctgctccccgtggctctcggcctagctggggccccacagacccccggcgtaggtcgcgcaatttgggtaaggtcatcgatacccttacgtgcggcttcgccgacctcatggggtacataccgctcgtcggcgcccctcttggagcgctgccagggccctggcgcatggcgtccgggttctggaagacggcgtgaactatgcaacagggaaccttcctggttgctctttctctatcttccttctggccctgctctcttgcctgactgtgccccttcggcctaccaagtgcgcaactccacggggctctaccatgtcaccaatgattgccctaactcgagtattgtgtacgaggcggctgatgccatcctgcacattccggggtgtgtcccttgcgttcgcgagggtaacgcctgaggtgttgggtgtcgataacccccacggtggccaccagggacggcaaactccccacgacgcaactacgacgtcacatcgatctgcttgtcgggagtgccaccctttgttcggccctctacgtggggacctgtgcgggtctgtctttcttgtcggtcagctgttcaccttctctccgaggctccactggacgacgcagggctgcaattgttccatctatcccggccatataacgggtcaccgcatggcatgggatatgatgatgaactgtcccctacgacggcattggtagtagctcagctgctccggatcccacaagccatcttggacatgatcgctggtgctcactggggagtcctggcgggcatagcgtatttctccatggtggggaactggcgaaggtcctggtagtgctgctgctatttgccggcgttgacgcgaccacccacgtcaccgggggaagcgtcgcccgcactacgtctagtcttgctaacctcctcacatcaggtgccaagcagaacatccagctgatcaacacaacggcagttggcacatcaataggacggccttgaactgcaatgatagcctcaacaccggctggatagcagggcttttctattaccacaaattcaactcttcaggctgtccccagaggttggccagtgccgacccctcaccgactttgaccagggctggggccctatcagtcatgccagcgtaaccggctccgaccaacgcccctactgctggcactaccccccaagaccttgcggtattgtgcccgcaaagagcgtgtgtggcccggatattgcttcactcccagccccgttgttgtgggaacgaccgacagggcgggcgtgcctacctacaactggggcgcgaatgaaacggacgttttcgtccttaacaacaccaggccaccgcggggcaatggttcggttgcacctggatgaactcaactggattcaccaaagtgtgcggagcgcccccttgtgtcatcgggggggggggcaacaacaccttgtactgccctactgattgtttccgcaagcatccggaagccacatactctcgtgcggctccggtccctggcttacacccaggtgcctggtcaactacccgtataggctttggcactatccttgtaccatcaactacaccatacctaaagtcaggatgtatgtgggaggggtcgagcatggctggaagctgcctgcaactggacgcggggtgaacgttgtgatctggaagacagggacaggtccgagctcagcccgttgctgttgtctaccacacagtggcaggtccttccgtgttccttcacgaccctgccagccttatcactggcctcatccacctccatcagaacattgtggacgtgcagtacttgtacggggtggggtcaagcgtcgcgtcctgggccatcaagtgggagtacgtcgttctcctgttccttctgcttgcagaccgcgcgtctgctcctgcttgtggatgatgttgctcatatcccaagtggaggcggctttggagaacctcataacactcaatgcagcatccctggccgggacgcacggtcttgtgtccttcctcgtgttcttctgctttgcatgtacctgaagggtaggtgggtgcccggagcggtctacgccctctacgggatgtggcctctcctcctgctcctgctggcgttgcctcaacgggcatacgcgctggacacggaggtggccgcgtcgtgtgcggcgttgtgcttgtcgggttaatggcgctgactctgtcaccatattacaagcactatatcagctggtgcttatggtggcttcagtattttctgaccagagtagaagcgcaatttcacgtgtgggttccccccctcaacgccgaggggggcgtgacgctgtcatcttactcatgtgtgttgtacacccgactctggtatttgacatcaccaaacagctgctggccgtcttcggacccctttggattctccaagccagtctgcttaagtcccctacttcgtgcgcgttcagggccttctccggatctgcgcgttggcgcggaagatggtcggaggccactacgtgcaaatggccatcatcaagttgggggcgcttactggcacctatgtttataaccatctcactcccctcgggactgggcgcacaacggcctgcgagatctggccgtggctgtagagccagtcgtcttctcccggatggagaccaagctcatcacgtggggggcagacaccgccgcgtgcggtgacatcatcaacgcttgcccgtctccgcccgtaagggccgggagatactgctcgggccagctgacggaatggtctccaagggttggagattgctggcgcccatcacagcgtacgcccagcaaacaaggggcctcctagggtgtataatcaccacctgactggccgggacaaaaaccaagcggagggtgaggtccagattgtgtcaactgctacccaaactttcttggcaacgtgcatcaatggggtatgctggactgtctaccacggggccgggacgaggccatcgcatcacccaagggtcctgtcattcagatgtacaccaatgtagaccaggaccttgtgggctggcccgcccctcaaggtacccgctcattggcaccctgcacctgcggctcctcggacctttacctggtcacgaggccgccgatgtcatccccgtgcgcagacggggtgatagcaggggcagcttgctttcgccccggcccatctcttacttgaaaggctcctcagggggtccgctgttgtgccccgcgggacacgccgtaggctattcagggccgcggtgtgcacccgtggagtggctaaggcggtggactttatccccgtggagaacctagagacaaccatgaggtccccggtgtttacggacaactcctccccaccagcagtgccccagagcttccaagtggccacctgcatgctcccacaggcagcggcaagagcaccaaggtcccggctgcatacgcagcccagggctacaaggtgctagtgctcaacccttctgtcgctgcaacactgggctttggtgcttacatgccaaggctcatggggtcgatcctaacatcaggaccggggtgagaacaattaccactggcagccccatcacgtactccacctacggcaagttccttgccgacggtgggtgctcagggggtgcttatgacataataatttgtgcgagtgccactccacggatgccacatctattttgggcatcggcactgtccttgatcaagcagagactgcgggggcgagactggttgtgctcgccaccgctacccctccgggctccatcactgtgcccatcccaatatcgaggaggttgctctgtccaccaccggagagatccctttctacggcaaggctatccccctcgaagtgatcaagggggggagacatctcatcttctgccactcaaagaggaagtgcgacgagctcgccgcaagctggtcgcattgggcatcaatgccgtggcttactaccgcggtcttgacgtgtccgtcattccgaccagcggcgatgttgtcgtcgtggcaactgatgctctcatgaccggctataccggcgacttcactcggtgatagactgcaacacgtgtgtcacccagacagtcgatttcagccttgaccctacctttaccattgagacaaccacgcttccccaggatgccgtctcccgcactcaacgtcggggcaggactggcagggggaagtaggcatctacagatttgtggcaccgggggagcgcccctccggtatgttcgactcgtccgtcctctgtgagtgctatgacgcgggctgtgcttggtatgagctcacgcccgccgagactacagttaggtacgagcgtacatgaacaccccggggcttcccgtgtgccaggaccatcttgagttttgggagggcgtctttacgggcctcacccatatagacgcccacttcctatctcagacaaagcagagtggggaaaactttccttaccggtagcgtaccaagccaccgtgtgcgctagggctcaagcccctcccccatcgtgggaccagatgtggaagtgtttgatccgcctcaaacccaccctcaatgggccaacacccctgctatacagactggcgctgttcagaatgaaatcaccctgacgcacccaatcaccaagtacatcatgacatgtatgtcggctgac

SEQ ID NO: 657 - DNA, 4881 bp, Hepatitis C virus
aacaccaaccgtcgcccacaggacgtcaagttcccgggtggcggtcagatcgttggtggagtttacttgttgccgcgcaggggccctagattgggtgtgcgcgcgacgaggaagacttcggagcggtgcaacctcgaggtagacgtcagcctatccccaaggcgcgtcggcccgagggcaggacctgggctcagcccgggtatccttggcccctctatggcaatgagggctgcgggtgggcgggatggcttctgctccccgtggctctcggcctagctggggccccacagacccccggcgtaggtcgcgcaatttgggtaaggtcatcgatacccttacgtgcggcttcgccgacctcatggggtacataccgctcgtcggcgcccctcttggagcgctgccagggccctggcgcatggcgtccgggttctggaagacggcgtgaactatgcaacagggaaccttcctggttgctctttctctatcttccttctggccctgctctcttgcctgactgtgccccttcggcctaccaagtgcgcaactccacggggctctaccatgtcaccaatgattgccctaactcgagtattgtgtacgaggcggctgatgccatcctgcacattccggggtgtgtcccttgcgttcgcgagggtaacgcctgaggtgttgggtgtcgataacccccacggtggccaccagggacggcaaactccccacgacgcaactacgacgtcacatcgatctgcttgtcgggagcgccaccctttgttcggccctctacgtggggacctgtgcgggtctgtctttcttgtcggtcagctgttcaccttctctccgaggctccactggacgacgcagggctgcaattgttccatctatcccggccatataacgggtcaccgcatggcatgggatatgatgatgaactgtcccctacgacggcattggtagtagctcagctgctccggatcccacaagccatcttggacatgatcgctggtgctcactggggagtcctggcgggcatagcgtacttctccatggtggggaactggcgaaggtcctggtagtgctgctgctatttgccggcgttgacgcgaccacccacgtcaccgggggaagcgtcgcccgcactacgtctagttttgctaacctcctcacatcaggtgccaagcagaacatccagctgatcaacacaacggcagttggcacatcaataggacggccttgaactgcaatgatagcctcaacaccggctggatagcagggcttttctattaccacaaattcaactcttcaggctgtccccagaggttggccagtgccgacccctcactgactttgaccagggctggggccctatcagtcatgccagcgtaaccggctccgaccaacgcccctactgttggcactaccccccaagaccttgcggtattgtgcccgcaaagagcgtgtgtggcccggatattgcttcactcccagccccgttgttgtgggaacgaccgacagggcgggcgtgcctacctacaactggggcgcgaatgaaacggacgttttcgtccttaacaacaccaggccaccgcggggcaatggttcggttgcacctggatgaactcaactggattcaccaaagtgtgcggagcgcccccttgtgtcatcgggggggggggcaacaacaccttgtactgccctactgattgtttccacaagcatccggaagccacatactctcgtgcggctccggtccctggcttacacccaggtgcctggtcaactacccgtataggctttggcactatccttgtaccatcaactacaccatatctaaagtcaggatgtatgtgggaggggtcgagcacggctggaagctgcctgcaactggacgcggggtgaacgttgtgatctggaagacagggacaggtccgagctcagcccgttgctgttgtctaccacacagtggcaggtccttccgtgttccttcacgaccctgccagccttatcactggcctcatccacctccatcagaacattgtggacgtgcagtacttgtacggggtggggtcaagcatcgcgtcctgggccatcaagtgggagtacgtcgttctcctgttccttctgcttgcagaccgcgcgtctgctcctgcttgtggatgatgttactcatatcccaagtggaggcggctttggagaacctcataacactcaatgcagcatccctggccgggacgcacggccttgtgtccttcctcgtgttcttctgctttgcatgtacctgaagggtaggtgggtgcccggagcggtctacgccctctacgggacgtggcctctcctcctgctcctgctggcgttgcctcaacgggcatacgcgctggacacggaggtggccgcgtcgtgtgcggcgttgtgcttgtcgggttaatggcgctgactctgtcaccatattacaagcactatatcagctggtgcttatggtggcttcagtattttctgaccagagtagaagcgcaatttcatgtgtgggttccccccctcaacgccgaggggggcgtgacgctgtcatcttactcatgtgtgttgtacacccgactctggtatttgacatcaccaaacagctgctggccgtcttcggacccctttggattctccaagccagtctgcttaagtcccctacttcgtgcgcgttcagggccttctccggatctgcgcgttggcgcggaagatggtcggaggccactacgtgcaaatggccatcatcaagttgggggcgcttactggcacctatgtttataaccatctcactcccctcgggactgggcgcacaacggcctgcgagatctggccgtggctgtagagccagtcgtcttctcccggatggagaccaagctcatcacgtggggggcagacaccgccgcgtgcggtgacatcatcaacggttgcccgtctccgcccgtaagggccgggagatactgctcgggccggctgacggaatggtctccaagggttggagattgctggcgcccatcacagcgtacgcccagcaaacaaggggcctcctagggtgtataatcaccacctgactggccgggacaaaaaccaagcggagggtgaggtccagatcgtgtcaactgctacccaaactttcttggcaacgtgcatcaatggggtatgctggactgtctaccacggggccgggacgaggccatcgcatcacccaagggtcctgtcattcagatgtacaccaatgtagaccaggaccttgtgggctggcccgcccctcaaggtacccgctcattggcaccctgcacctgcggctcctcggacctttacctggtcacgaggccgccgatgtcatccccgtgcgcaggcggggtgatagcaggggcagcttgctttcgccccggcccatctcttacttgaaaggctcctcagggggtccgctgttgtgccccgcgggacacgccgtaggctattcagggccgcggtgtgcacccgtggagtggctaaggcggtggactttatccctgtggagaacctagagacaaccatgaggtccccggtgtttacggacaactcctccccaccagcagtgccccagagcttccaagtggccacctgcatgctcccacaggcagcggcaagagcaccaaggtcccggctgcatacgcagcccagggctacaaggtgctagtgctcaacccttctgtcgctgcaacactgggctttggtgcttacatgccaaggctcatggggtcgatcctaacatcaggaccggggtgagaacaattaccactggcagccccatcacgtactccacctacggcaagttccttgccgacggcgggtgctcagggggtgcttatgacataataatttgtgcgagtgccactccacggatgccacatctatcttgggcatcggcactgtccttgatcaagcagagactgcgggggcgagactggttgtgctcgccaccgctacccctccgggctccatcactgtgcccatcccaatatcgaggaggttgctctgtccaccaccggagagatccctttctacggcaaggctatccccctcgaagtgatcaagggggggaggcatctcatcttctgccactcaaagaggaagtgcgacgagctcgccgcaagctggtcgcattgggcatcaatgccgtggcttactaccgcggtcttgacgtgtctgtcattccgaccagcggcgatgttgtcgtcgtggcaactgatgctctcatgaccggctataccggcgacttcactcggtgatagactgcaacacgtgtgtcacccagacagtcgatttcagccttgaccctaccttcaccattgagacaaccacgcttccccaggatgccgtctcccgcactcaacgtcggggcaggactggcagggggaagtaggcatctacagatttgtggcaccgggggagcgcccctccggtatgttcgactcgtccgtcctctgtgagtgctatgacgcgggctgtgcttggtatgagctcacgcccgccgagactacagttaggtacgagcgtacatgaacaccccggggcttcccgtgtgccaggaccatcttgagttttgggagggcgtctttacgggcctcacccatatagacgcccacttcctatctcagacaaagcagagtggggaaaactttccttaccggtagcgtaccaagccaccgtgtgcgctagggctcaagcccctcccccatcgtgggaccagatgtggaagtgtttgatccgcctcaaacccaccctcaatgggccaacacccctgctatacagactggcgctgttcagaatgaaatcaccctgacgcacccaatcaccaagtacatcatgacatgtatgtcggctgac

SEQ ID NO: 658 - DNA, 4154 bp, Hepatitis C virus
aacaccaaccgtcgcccacaggacgtcaagttcccgggtggcggtcagatcgttggtggagtttacttgttgccgcgcaggggccctagattgggtgtgcgcgcgacgaggaagacttcggagcggtgcaacctcgaggtagacgtcagcctatccccaaggcgcgtcggcccgagggcaggacctgggctcagcccgggtatccttggcccctctatggcaacgagggctgcgggtgggcgggatggctcctgctccccgtggctctcggcctagttggggccccacagacccccggcgtaggtcgcgcaatttgggtaaggtcatcgatacccttacgtgcggcttcgccgacctcatggggtacataccgctcgtcggcgcccctcttggagcgctgccagggccctggcgcatggcgtccgggttctggaagacggcgtgaactatgcaacagggaaccttcctggttgctctttctctatcttccttttggccctgctctcttgcctgactgtgccccttcggcctaccaagtgcgcaactccacggggctctaccatgtcaccaatgattgccctaactcgagtattgtgtacgaggcggctgatgccatcctgcacattccggggtgtgtcccttgcgttcgcgagggtaacgcctgaggtgttgggtgtcgataacccccacggtggccaccagggacggcaaactccccacgacgcaactacgacgtcacatcgatctgcttgtcgggagcgccaccctttgttcggccctctacgtggggacctgtgcgggtctgtctttcttgtcggtcagctgttcaccttctctccgaggctccactggacgacgcagggctgcaattgttccatctatcccggccatataacgggtcaccgcatggcatgggatatgatgatgaactgtcccctacgacggcattggtagtagctcagctgctccggatcccacaagccatcttggacatgatcgctggtgctcactggggagtcctggcgggcatagcgtatttctccatggtggggaactggcgaaggtcctggtagtgctgctgctatttgccggcgttgacgcgaccacccacgtcaccgggggaagcgtcgcccgcactacgtctagttttgctaacctcctcacatcaggtgccaagcagaacatccagctgatcaacacaacggcagttggcacatcaataggaccacacagtggcaggtccttccgtgttccttcacgaccctgccagccttatccactggcctcatccacctccatcagaacattgtggacgtgcagtacttgacggggtggggtcaagcatcgcgtcctgggccatcaagtgggagtacgtcgttctcctgttccttctgctcgcagacgcgcgcgtctgctcctgcttgtggatgatgttactcatatcccaagtggaggcggctttggagacctcataacactcaatgcagcatccctggccgggacgcacggccttgtgtccttcctcgtgttcttctgctttgcatggtatctgaagggtaggtgggtgcccggagcggtctacgccctctacgggtgtggcctctcctcctgctcctgctggcgttgcctcaacgggcatacgcgctggacacggaggtggccgcgtcgtgtggcggcattgtgcttgtcgggttaatggcgctgactctgtcaccatattacaagcactatatcactggtgcttatggtggcttcagtattttctgaccagagtggaagcgcaatttcacgtgtgggttccccccctcaacgtccgaggggggcgtgacgctgtcatcttactcatgtgtgttgtacacccgctctgatatttgacatcaccaaacagctgctggccgtcttcggacccctttggattctccaagccagtctgcttaagatcccctacttcgtgcgcgttcagggccttctccggatctgcgcgttagcgcggaagatggtcgaggccactacgtgcaaatggccatcatcaagttgggggcgcttactggcacctatgtttataaccatctcactccccttcgggactgggcgcacaacggcctgcgagatctggccgtggctgtagagcagtcgtcttctcccggatggagaccaagctcatcacgtggggggcagacaccgccgcgtgcggtgacatcatcaacggcttgcccgtctccgcccgtaagggccgggagatactgctcgggccagctgacggaatggtctcaagggttggagattgctggcgcccatcacagcgtacgcccagcaaacaaggggcctcctagggtgtataatcaccagcctgactggccgggacaaaaaccaagcggagggtgaggtccagattgtgcaactgctacccaaactttcttggcaacgtgcatcaacggggtatgctggactgtctaccacggggccgggacgaggaccatcgcatcacccaagggtcctgtcattcagatgtacaccaatgtagaccaggaccttgtggctggcccgcccctcaaggtacccgctcattggcaccctgcacctgcggctcctcggacctttacctggtcacgaggcacgccgatgtcatccccgtgcgcaggcggggtgatagcaggggcagcttgtttcgccccggcccatctcttacttgaaaggctcctcagggggtccgctgttgtgccccgcgggacacgccgtaggcatattcagggccgcggtgtgcacccgtggagtggctaaggcggtggactttatccctgtggagacctagagacaaccatgaggtccccggtgtttacggacaactcctccccaccagcagtgccccagagcttccaagtggcccatctgcatgctcccacaggcagcggcaagagcaccaaggtcccggctcatacgcagcccagggctacaaggtgctagtgctcaacccttctgtcgctgcaacactgggctttggtgcttacatgtccaaggctcatggggtcgatcctaacatcaggaccggggtgagaacaattaccactggcagcccatcacgtactccacctacggcaagttccttgccgacggcgggtgctcagggggtgcttatgacataataatttgtgacgagtgccactccacggatgccacatctatcttgggcatcggcactgtcttgatcaagcagagactgcgggggcgagactggttgtgctcgccaccgctacccctccgggctccatcactgtgccccatcccaatatcgaggaggttgctctgtccaccaccggagagatccctttctacggcaaggctaccccctcgaagtgatcaagggggggagacatctcatcttctgccactcaaagaggaaatgcgacgagctcgccgcaaagctggtcgcattgggcatcaatgccgtggcttactaccgcggtcttgactgtctgtcattccgaccagcggcgatgttgtcgtcgtggcaactgatgctctcatgaccggctataccggcgacttcgactcggtgatagactgcaacacgtgtgtcacccagacagtcgatttcagccttgaccctacctcaccattgagacaaccacgcttccccaggatgccgtctcccgcactcaacgtcggggcaggactggcagggggaagtcaggcatctacagatttgtggcaccgggggagcgcccctccggtatgttcactcgtccgtcctctgtgagtgctatgacgcgggctgtgcttggtatgagctcacgcccgccgagactacagttaggctacgagcgtacatgaacaccccggggcttcccgtgtgccaggaccatcttgagttttgggaggcgtctttacgggcctcacccatatagacgcccacttcctatctcagacaaagcagagtggggaaaactttccttacctggtagcgtaccaagccaccgtgtgcgctagggctcaagcccctcccccacgtgggaccagatgtggaagtgtttgatccgcctcaaacccaccctcaatgggccaacacccctgctatacagactgggcgctgttcagaatgaaatcaccctgacgcacccaatcaccaagtacatcatgacatgtatgtggctgac

SEQ ID NO: 659 - DNA, 4881 bp, Hepatitis C virus
aacaccaaccgtcgcccacaggacgtcaagttcccgggtggcggtcagatcgttggtggagtttacttgttgccgcgcaggggccctagattgggtgtgcgcgcgacgaggaagacttcggagcggtgcaacctcgaggtagacgtcagcctatccccaaggcgcgtcggcccgagggcaggacctgggctcagcccgggtatccttggcccctctatggcaatgagggctgcgggtgggcgggatggctcctgctccccgtggctctcggcctagctggggccccacagacccccggcgtaggtcgcgcaatttgggtaaggtcatcgatacccttacgtgcggcttcgccgacctcatggggtacataccgctcgtcggcgcccctcttggagcgctgccagggccctggcgcatggcgtccgggttctggaagacggcgtgaactatgcaacagggaaccttcctggttgctctttctctatcttccttctggccctgctctcttgcctgactgtgccccttcggcctaccaagtgcgcaactccacggggctctaccatgtcaccaatgattgccctaactcgagtattgtgtacgaggcggctgatgccatcctgcacattccggggtgtgtcccttgcgttcgcgagggtaacgcctgaggtgttgggtgtcgataacccccacggtggccaccagggacggcaaactccccacgacgcaactacgacgtcacatcgatctgcttgtcgggagcgccaccctttgttcggccctctacgtggggacctgtgcgggtctgtctttcttgtcggtcagctgttcaccttctctccgaggctccactggacgacgcagggctgcaattgttccatctatcccggccatataacgggtcaccgcatggcatgggatatgatgatgaactgtcccctacgacggcattggtagtagctcagctgctccggatcccacaagccatcttggacatgatcgctggtgctcactggggagtcctggcgggcatagcgtatttctccatggtggggaactggcgaaggtcctggtagtgctgctgctatttgccggcgttgacgcgaccacccacgtcaccgggggaagcgtcgcccgcactacgtctagtcttgctaacctcctcacatcaggtgccaagcagaacatccagctgatcaacacaacggcagttggcacatcaataggacggccttgaactgcaatgatagcctcaacaccggctggatagcagggcttttctattaccacaaattcaactcttcaggctgtccccagaggttggccagtgccgacccctcaccgactttgaccagggctggggccctatcagtcatgccagcgtaaccggctccgaccaacgcccctactgctggcactaccccccaagaccttgcggtattgtgcccgcaaagagcgtgtgtggcccggatattgcttcactcccagccccgttgttgtgggaacgaccgacagggcgggcgtgcctacctacaactggggcgcggatgaaacggacgttttcgtccttaacaacaccagaccaccgcggggcaatggttcggttgcacctggatgaactcaactggattcaccaaagtgtgcggagcgcccccttgtatcatcgggggggggggcaacaacaccttgtactgccctactgattgtttccgcaagcatccggaagccacatactctcgtgcggctccggtccctggcttacacccaggtgcctggtcaactacccgtataggctttggcactatccttgtaccatcaactacaccatatctaaagtcaggatgtatgtgggaggggtcgagcacggctggaagctgcctgcaactggacgcggggtgaacgttgtgatctggaagacagggacaggtccgagctcagcccgttgctgttgtctaccacacagtggcaggtccttccgtgttccttcacgaccctgccagccttatcactggcctcatccacctccatcagaacattgtggacgtgcagtacttgtacggggtggggtcaagcatcgcgtcctgggccatcaagtgggagtacgtcgttctcctgttccttctgcttgcagaccgcgcgtctgctcctgcttgtggatgatgttactcatatcccaagtggaggcggctttggagaacctcataacactcaatgcagcatccctggccgggacgcacggccttgtgtccttcctcgtgttcttctgctttgcatgtacctgaagggtaggtgggtgcccggagcggtctacgccctctacgggacgtggcctctcctcctgctcctgctggcgttgcctcaacgggcatacgcgctggacacggaggtggccgcgtcgtgtgcggcgttgtgcttgtcgggttaatggcgctgactctgtcaccatattacaagcactatatcagctggtgcttatggtggcttcagtattttctgaccagagtagaagcgcaatttcacgtgtgggttccccccctcaacgccgaggggggcgtgacgctgtcattttactcatgtgtgttgtacacccgactctggtatttgacatcaccaaacagctgctggccgtcttcggacccctttggattctccaagccagtctgcttaagtcccctacttcgtgcgcgttcagggccttctccggatctgcgcgttggcgcggaagatggtcggaggccactacgtgcaaatggccatcatcaagttgggggcgcttactggcacctatgtttataaccatctcactcccctcgggactgggcgcacaacggcctgcgagatctggccgtggctgtagagccagtcgtcttctcccggatggagaccaagctcatcacgtggggggcagataccgccgcgtgtggtgacatcatcaacgcttgcccgtctccgcccgtaagggccgggagatactgctcgggccagctgacggaatggtctccaagggttggagattgctggcgcccatcacagcgtacgcccagcaaacaaggggcctcctagggtgtataatcaccacctgactggccgggacaaaaaccaagcggagggtgaggtccagattgtgtcaactgctacccaaactttcttggcaacgtgcatcaatggggtatgctggactgtctaccacggggccgggacgaggccatcgcatcacccaagggtcctgtcattcagatgtacaccaatgtagaccaggaccttgtgggctggcccgcccctcaaggtacccgctcattggcaccctgcacctgcggctcctcggacctttacctggtcacgaggccgccgatgtcatccccgtgcgcaggcggggcgatagcaggggcagcttgctttcgccccggcccatctcttacttgaaaggctcctcagggggtccgctgttgtgccccgcgggacacgccgtaggctattcagggccgcggtgtgcacccgtggagtggctaaggcggtggactttatccctgtggagaacctagagacaaccatgaggtccccggtgtttacggacaactcctccccaccagcagtgccccagagcttccaagtggccacctgcatgctcccacaggcagcggcaagagcaccaaagtcccggctgcatacgcagcccagggctacaaggtgctagtgctcaacccttctgtcgctgcaacactgggctttggtgcttacatgccaaggctcatggggtcgatcctaacatcaggaccggggtgagaacaattaccactggcagccccatcacgtactccacctacggcaagttccttgccgacggcgggtgctcagggggtgcttatgacataataatttgtgcgagtgccactccacggatgccacatctattttgggcatcggcactgtccttgatcaagcagagactgcgggggcgagactggttgtgctcgccaccgctacccctccgggctccatcactgtgcccatcccaatatcgaggaggttgctctgtccaccaccggagagatccctttctacggcaaggctatccccctcgaagtgatcaagggggggagacatctcatcttctgccactcaaagaggaagtgcgacgagctcgccgcaagctggtcgcattgggcatcaatgccgtggcttactaccgcggtcttgacgtgtctgtcattccgaccagcggcgatgttgtcgtcgtggcaactgatgctctcatgaccggctataccggcgacttcactcggtgatagactgcaacacgtgtgtcacccagacagtcgatttcagccttgaccctacctttaccattgagacaaccacgcttccccaggatgccgtctcccgcactcaacgtcggggcaggactggcagggggaagtaggcatctacagatttgtggcaccgggggagcgcccctccggtatgttcgactcgtccgtcctctgtgagtgctatgacgcgggctgtgcttggtatgagctcacgcccgccgagactacagttaggtacgagcgtacatgaacaccccggggcttcccgtgtgccaggaccatcttgagttttgggagggcgtctttacgggcctcacccatatagacgcccacttcctatctcagacaaagcagagtggggaaaactttccttaccggtagcgtaccaagccaccgtgtgcgctagggctcaagcccctcccccatcgtgggaccagatgtggaagtgtttgatccgcctcaaacccaccctcaatgggccaacacccctgctatacagactggcgctgttcagaatgaaatcaccctgacgcacccaatcaccaagtacatcatgacatgtatgtcggctgac

SEQ ID NO: 660 - DNA, 4881 bp, Hepatitis C virus
aacaccaaccgtcgcccacaggacgtcaagttcccgggtggcggtcagatcgttggtggagtttacttgttgccgcgcaggggccctagattgggtgtgcgcgcgacgaggaagacttccgagcggtgcaacctcgaggtagacgtcagcctatccccaaggcgcgtcgccccgagggcaggacctgggctcagcccgggtatccttggcccctctatggcaatgagggctgcgggtgggcgggatggctcctgctccccgtggctctcggcctagctggggccccacagacccccggcgcaggtcgcgcaatttgggtaaggtcatcgatacccttacgtgcggcttcgccgacctcatggggtacataccgctcgtcggcgcccctcttggagcgctgccagggccctggcgcatggcgtccgggttctggaagacggcgtgaactatgcaacagggaaccttcctggttgctctttctctatcttccttctggccctgctctcttgcctgactgtgccccttcggcctaccaagtgcgcaactccacggggctctaccatgtcaccaatgattgccctaactcgagtattgtgtacgaggcggctgatgccatcctgcacattccggggtgtgtcccttgcgttcgcgagggtaacgcctgaggtgttgggtgtcgataacccccacggtggccaccagggacggcaaactccccacgacgcaactacgacgtcatatcgatctgcttgtcgggagcgccaccctttgttcggccctctacgtggggacctgtgcgggtctgtctttcttgtcggtcagctgttcaccttctctccgaggctccactggacgacgcagggctgcaattgttccatctatcccggccatataacgggtcaccgcatggcatgggatatgatgatgaactgtcccctacgacggcattggtagtagctcagctgctccggatcccacaagccatcttggacatgatcgctggtgctcactggggagtcctggcgggcatagcgtatttctccatggtggggaactggcgaaggtcctggtagtgctgctgctatttgccggcgttgacgcgaccacccacgtcaccgggggaagcgtcgcccgcactacgtctagttttgctaacctcctcacatcaggtgccaagcagaacatccagctgatcaacacaacggcagttggcacatcaataggacggccttgaactgcaatgatagcctcaacaccggctggatagcagggcttttctattaccacaaattcaactcttcaggctgtccccagaggttggccagtgccgacccctcaccgactttgaccagggctggggccctatcagtcatgccagcgtaaccggctccgaccaacgcccctactgctggcactaccccccaagaccttgcggtattgtgcccgcaaagagcgtgtgtggcccggatattgcttcactcccagccccgttgttgtgggaacgaccgacagggcgggcgtgcctacctacaactggggcgcgaatgaaacggacgttttcgtccttaacaacaccaggccaccgcggggcaatggttcggttgcacctggatgaactcaactggattcaccaaagtgtgcggagcgcccccttgtgtcatcgggggggggggcaacaacaccttgtactgccctactgattgtttccgcaagcatccggaagccacatactctcgtgcggctccggtccctggcttacacccaggtgcctggtcaactacccgtataggctttggcactatccttgtaccatcaactacaccatatctaaagtcaggatgtatgtgggaggggtcgagcacggctggaagctgcctgcaactggacgcggggtgaacgttgtgatctggaagacagggacaggtccgagctcagcccgttgctgttgtctaccacacagtggcaggtccttccgtgttccttcacgaccctgccagccttatcactggcctcatccacctccatcagaacattgtggacgtgcagtacttgtacggggtggggtcaagcatcgcgtcctgggccatcaagtgggagtacgtcgttctcctgttccttctgcttgcagaccgcgcgtctgctcctgcttgtggatgatgttactcatatcccaagtggaggcggctttggagaacctcataacactcaatgcagcatccctggccgggacgcacggccttgtgtccttcctcgtgttcttctgctttgcgtgtacctgaagggtaggtgggtgcccggagcggtctacgccctctacgggatgtggcctctcctcctgctcctgctggcgttgcctcaacgggcatacgcgctggacacggaggtggccgcgtcgtgtgcggcgttgtgcttgtcgggttaatggcgctgactctgtcaccatattacaagcactatatcagctggtgcttatggtggcttcagtactttctgaccagagtagaagcgcaatttcacgtgtgggttccccccctcaacgccgaggggggcgtgacgctgtcatcttactcatgtgtgttgtacacccgactctggtatttgacatcaccaaacagctgctggccgtcttcggacccctttggattctccaagccagtctgcttaagtcccctacttcgtgcgcgttcagggccttctccggatctgcgcgttagcgcggaagatggtcggaggccactacgtgcaaatggccatcatcaagttgggggcgcttactggcacctatgtttataaccatctcactcccctcgggactgggcgcacaacggcctgcgagatctggccgtggctgtagagccagtcgtcttctcccggatggagaccaagctcatcacgtggggggcagacaccgccgcgtgcggtgacatcatcaacgcttgcccgtctccgcccgtaagggccgggagatactgctcgggccagctgacggaatggcctccaagggttggagattgctggcgcccatcacagcgtacgcccagcaaacaaggggcctcctagggtgtataatcaccacctgactggccgggacaaaaaccaagcggagggtgaggtccagattgtgtcaactgctacccaaactttcttggcaacgtgcatcaatggggtatgctggactgtctaccacggggccgggacgaggccatcgcatcacccaagggtcctgtcattcaaatgtacaccaatgtagaccaggaccttgtgggctggcccgcccctcaaggtacccgctcattggcaccctgcacctgcggctcctcggacctttacctggtcacgaggccgccgatgtcatccccgtgcgcaggcggggtgatagcaggggcagcttgctttcgccccggcccatctcttacttgaaaggctcctcagggggtccgctgttgtgccccgcgggacacgccgtaggctattcagggccgcggtgtgcacccgtggagtggctaaggcggtggactttatccctgtggagaacctagagacaaccatgaggtccccggtgtttacggacaactcttccccaccagcagtgccccagagcttccaagtggccacctgcatgctcccacaggcagcggcaagagcaccaaggtcccggctgcatacgcagcccagggctacaaggtgctagtgctcaacccttctgtcgctgcaacactgggctttggtgcttacatgccaaggctcatggggttgatcctaacatcaggaccggggtgagaacaattaccactggcagccccatcacgtactccacctacggcaagttccttgccgacggcgggtgctcagggggtgcttatgacataataatttgtgcgagtgccactccacggatgccacatctatcttgggcatcggcactgtccttgatcaagcagagactgcgggggcgagactggttgtgctcgccactgctacccctccgggctccatcactgtgcccatcccaatatcgaggaggttgctctgtccaccaccggagagatccctttctacggcaaggctatccccctcgaagtgatcaagggggggagacatctcatcttctgccactcaaagaggaagtgcgacgagctcgccgcaagctggtcgcattgggcatcaatgccgtggcttactaccgcggtcttgacgtgtctgtcattccgaccagcggcgatgttgtcgtcgtggcaactgatgctctcatgaccggctataccggcgacttcactcggtgatagactgcaacacgtgtgtcacccagacagtcgatttcagccttgaccctaccttcaccattgagacaaccacacttccccaggatgccgtctcccgcactcaacgtcggggcaggactggcagggggaagtaggcatctacagatttgtggcaccgggggagcgcccctccggtatgttcgactcgtccgtcctctgtgagtgctatgacgcgggctgtgcttggtatgagctcacgcccgccgagactacagttaggtacgagcgtacatgaacaccccggggcttcccgtgtgccaggaccatcttgagttttgggagggcgtctttacgggcctcacccatatagatgcccacttcctatctcagacaaagcagagtggggaaaactttccttaccggtagcgtaccaagccaccgtgtgcgctagggctcaagcccctcccccatcgtgggaccagatgtggaagtgtttgatccgcctcaaacccaccctcaatgggccaacacccctgctatacagactggcgctgttcagaatgaaatcaccctgacgcacccaatcaccaagtacatcatgacatgtatgtcggctgac

SEQ ID NO: 661 - DNA, 4881 bp, Hepatitis C virus
aacaccaaccgtcgcccacaggacgtcaagttcccgggtggcggtcagatcgttggtggagtttacttgttgccgcgcaggggccctagattgggtgtgcgcgcgacgaggaagacttccgagcggtgcaacctcgaggtagacgtcagcctatccccaaggcgcgtcggcccgagggcaggacctgggctcagcccgggtatccttggcccctctatggtaatgagggctgcgggtgggcgggatggctcctgctccccgtggctctcggcctagctggggccccacagacccccggcgtaggtcgcgcaatttgggtaaggtcatcgatacccttacgtgcggcttcgccgacctcatggggtacataccgctcgtcggcgcccctcttggagcgctgccagggccctggcgcatggcgtccgggttctggaagacggcgtgaactatgcaacagggaaccttcctggttgctctttctctatcttccttctggccctgctctcttgcctgactgtgccccctcggcctaccaagtgcgcgactccacagggctctaccatgtcaccaatgattgccctaactcgagtattgtgtacgaggcggctgatgccatcctgcacattccggggtgtgtcccttgcgttcgcgagggtaacgcctgaggtgttgggtgccgataacccccacggtggccaccagggacggcaaactccccacgacgcagctacgacgtcacatcgatctgcttgtcgggagcgccaccctttgttcggccctctacgtggggacctgtgcgggtctgtctttcttgtcggtcagctgttcaccttctctccgaggctccactggacgacgcagggctgcaattgttccatctatcccggccatataacgggtcaccgcatggcatgggatatgatgatgaactgtcccctacgacggcattggtagtagctcagctgctccggatcccacaagccatcttggacatgatcgctggtgctcactggggagtcctggcgggcatagcgtatttctccatggtggggaactggcgaaggtcctggtagtgctgctgctatttgccggcgttgacgcgagcacccacgtcaccgggggaagcgccgcccgcgctgcgtctggccttactagcatcttcacaccaggtgctaagcagaacatccagctgatcaacacaacggcagttggcacatcaataggacggccttgaactgcaatgacaacctcgacaccggctggatagcagggcttttctattacaacaaattcaactcttcaggctgtccccagaggttggccagcgccgacccctcaccgactttgaccagggctggggccctatcagtcatgccagcgtaaacggctccgaccaacgcccttactgctggcactaccccccaagaccttgcggtattgtgcccgcaaagagcgtgtgtggcccggatattgcttcactcccagccccgttgttgtgggaacgaccgacagggcgggcgtgcctacttataactggggcgcgaatgaaacggacgttttcgtccttaacaacaccaggccaccgcggggcaatggttcggttgcacctggatgaactcaaccggattcaccaaagtgtgcggagcgcccccctgtgtcatcgggggggggggcaacaacaccttgtactgccctactgattgtttccgcaagcatccggaagccacatactctcgtgcggctccggtccctggcttacacccaggtgcctggtcaactacccgtataggctttggcactatccttgtaccatcaactacaccatatctaaagtcaggatgtatgtgggaggggtcgagcacggctggaagctgcctgcaactggacgcggggtgaacgttgtgatctggaagacagggacaggtccgagctcagcccgttgctgttgtctaccacacagtggcaggtccttccgtgttccttcacgaccctgccagccctatcactggcctcatccacctccatcagaacattgtggacgtgcagtacttgtacggggtggggtcaagcatcgcgtcctgggccatcaagtgggagtacgtcgttctcctgttccttctgcttgcagaccgcgcgtctgctcctgcttgtggatgatgttactcatatcccaagtggaggcggctttggagaacctcataacactcaatgcagcatctctggccgggacgcacggccttgtgtccttcctcgtgttcttctgctttgcatgtacctgaagggtaggtgggtgcccggagcggtctacgccctctacgggatgtggcctctcctcctgctcctgctggcgttgcctcaacgggcatacgcgctggacacggaggtggccgcgtcgtgtgcggcgtcgtgcttgtcgggttaatggcgctgactctgtcaccatattacaagcgctatatcagctggtgtttatggtggcttcagtattttctgaccagagtagaagcgcaacttcacgtgtgggttccccccctcaacgccgaggggggcgtgacgctgtcatcttactcatgtgtgttgtacacccgactctggtgtttgacatcaccaaacagctgctggccgtcttcggacccctttggattcttcaagccagtctgcttaagtcccctacttcgtgcgcgttcaaggccttctccggatttgcgcgttagcgcggaagatggtaggaggccactacgtgcaaatggccatcatcaagttgggggcgcttactggcacctatgtttataaccacctcactcccctcgggactgggcgcacaacggcctgcgagatctggccgtggctgtagagccagtcgtcttctcccggatggagaccaagctcatcacgtggggggcagacaccgccgcgtgcggtgacatcatcaacgcttgcccgtctccgcccgtaagggccgggagatactgctcgggccagccgacggaatggtctccaagggttggagattgctggcgcccatcacagcgtacgcccagcaaacaaggggcctcctagggtgtataatcaccacctgactggccgggacaaaaaccaagcggagggtgaggtccagattgtgtcaactgctacccaaaccttcttggcaacgtgcatcaatggggtatgctggactgtctaccacggggccgggacgaggccatcgcatcacccaagggtcctgtcatccagatgtacaccaatgtagaccaggaccttgtgggctggcccgcccctcaaggtacccgctcattggcaccctgcacctgcggctcctcggacctttacctggtcacgaggccgccgacgtcatccccgtgcgcaggcggggtgatagcaggggcagcttgctttcgccccggcccatttcttacttgaaaggctcctcagggggtccgctgttgtgccccgcgggacacgccgtaggctattcagggccgcggtgtgcacccgtggagtggctaaggcggtggactttatccctgtggagaacctagagacaaccatgaggtccccggtgtttacggacaactcctccccaccagcagtgccccagagcttccaagtggccacctgcatgctcccacaggcagcggcaagagcaccaaggtcccggctgcatacgcagcccagggctacaaggtgctagtgctcaacccttctgttgctgcaacactgggctttggtgcttacatgccaaggctcatggggtcgatcctaacatcaggaccggggtgagaacaattaccactggcagccccatcacgtactccacctacggcaagttccttgccgacggcgggtgctcagggggtgcttatgacataataatttgtgcgagtgccactccacggatgccacatccatcttgggcatcggcaccgtccttgatcaagcagagactgcgggggcgagactggttgtgctcgccaccgctacccctccgggctccatcactgtgcccatcctaatatcgaggaggttgctctgtccaccaccggagagatccctttctacggcaaggctatccccctcgaagtgatcaagggggggagacatctcatcttctgtcactcaaagaggaagtgcgacgagctcgccgcaagctggtcgcattgggcatcaatgccgtggcttactaccgcggtcttgacgtgtctgtcattccgaccagcggcgatgttgtcgtcgtggcaactgatgccctcatgaccggctataccggcgacttcactcggtgatagactgcaacacgtgtgtcacccagacagtcgatttcagccttgaccctaccttcaccattgagacaaccacgcttccccaggatgccgtctcccgcactcaacgtcggggcaggactggcagggggaagtaggcatctacagatttgtggcaccgggggagcgcccctccggtatgttcgactcgtccgtcctctgtgagtgctatgacgcgggctgtgcttggtatgagctcacgcccgccgagactacagttaggtacgagcgtacatgaacaccccggggcttcccgtgtgccaggaccatcttgagttttgggagggcgtctttacgggcctcacccatatagatgcccacttcctatctcagacaaagcagagtggggaaaactttccttaccggtagcgtaccaagccaccgtgtgcgctaggtctcaagcccctcccccatcgtgggaccagatgtggaagtgtttgatccgcctcaaacccaccctcaatgggccaacacccctgctatacagactggcgctgttcagaatgaagtcaccctgacgcacccaatcaccaagtacatcatgacatgtatgtcggctgac

SEQ ID NO: 662 - DNA, 4881 bp, Hepatitis C virus
aacaccaaccgtcgcccacaggacgtcaagttcccgggtggcggtcagatcgttggtggagtttacttgttgccgcgcaggggccctagattgggtgtgcgcgcgacgaggaagacttccgagcggtgcaacctcgaggtagacgtcagcctatccccaaggcgcgtcggcccgagggcaggacctgggctcagcccgggtatccttggcccctctatggtaatgagggctgcgggtgggcgggatggctcctgctccccgtggctctcggcctagctggggccccacagacccccggcgtaggtcgcgcaatttgggtaaggtcatcgatacccttacgtgcggcttcgccgacctcatggggtacataccgctcgtcggcgcccctcttggagcgctgccagggccctggcgcatggcgtccgggttctggaagacggcgtgaactatgcaacagggaaccttcctggttgctctttctctatcttccttctggccctgctctcttgcctgactgtgccccctcggcctaccaagtgcgcaactccacagggctctaccatgtcaccaatgattgccctaactcgagtattgtgtacgaggcggctgatgccatcctgcacattccggggtgtgtcccttgcgttcgcgagggtaacgcctgaggtgttgggtgccgataacccccacggtggccaccagggacggcaaactccccacgacgcagctacgacgtcacatcgatctgcttgtcgggagcgccaccctttgttcggccctctacgtggggacctgtgcgggtctgtctttcttgtcggtcagctgttcaccttctctccgaggctccactggacgacgcagggctgcaattgttccatctatcccggccatataacgggtcaccgcatggcatgggatatgatgatgaactgtcccctacgacggcattggtagtagctcagctgctccggatcccacaagccatcttggacatgatcgctggtgctcactggggagtcctggcgggcatagcgtatttctccatggtggggaactggcgaaggtcctggtagtgctgctgctatttgccggcgttgacgcgagcacccacgtcaccgggggaagcgccgcccgcgctgcgtctggccttactagcatcttcacaccaggtgctaagcagaacatccagctgatcaacacaacggcagttggcacatcaataggacggccttgaactgcaatgacaacctcgacaccggctggatagcagggcttttctattacaacaaattcaactcttcaggctgtccccagaggttggccagcgccgacccctcaccgactttgaccagggctggggccctatcagtcatgccagcgtaaacggctccgaccaacgcccttactgctggcactaccccccaagaccttgcggtattgtgcccgcaaagagcgtgtgtggcccggatattgcttcactcccagccccgttgttgtgggaacgaccgacagggcgggcgtgcctacttataactggggcgcgaatgaaacggacgttttcgtccttaacaacaccaggccaccgcggggcaatggttcggttgcacctggatgaactcaaccggattcaccaaagtgtgcggagcgcccccctgtgtcatcgggggggggggcaacaacaccttgtactgccctactgattgtttccgcaagcatccggaagccacatactctcgtgcggctccggtccctggcttacacccaggtgcctggtcaactacccgtataggctttggcactatccttgtaccatcaactacaccatatctaaagtcaggatgtatgtgggaggggtcgagcacggctggaagctgcctgcaactggacgcggggtgaacgttgtgatctggaagacagggacaggtccgagctcagcccgttgctgttgtctaccacacagtggcaggtccttccgtgttccttcacgaccctgccagccctatcactggcctcatccacctccatcagaacattgtggacgtgcagtacttgtacggggtggggtcaagcatcgcgtcctgggccatcaagtgggagtacgtcgttctcctgttccttctgcttgcagaccgcgcgtctgctcctgcttgtggatgatgttactcatatcccaagtggaggcggctttggagaacctcataacactcaatgcagcatctctggccgggacgcacggccttgtgtccttcctcgtgttcttctgctttgcatgtacctgaagggtaggtgggtgcccggagcggtctacgccctctacgggatgtggcctctcctcctgctcctgctggcgttgcctcaacgggcatacgcgctggacacggaggtggccgcgtcgtgtgcggcgtcgtgcttgtcgggttaatggcgctgactctgtcaccatattacaagcgctatatcagctggtgcttatggtggcttcagtattttctgaccagagtagaagcgcaacttcacgtgtgggttccccccctcaacgccgaggggggcgtgacgctgtcatcttactcatgtgtgttgtacacccgactctggtgtttgacatcaccaaacagctgctggccgtcttcggacccctttggattcttcaagccagtctgcttaagtcccctacttcgtgcgcgttcaaggccttctccggatttgcgcgttagcgcggaagatggtaggaggccactacgtgcaaatggccatcatcaagttgggggcgcttactggcacctatgtttataaccacctcactcccctcgggactgggcgcacaacggcctgcgagatctggccgtggctgtagagccagtcgtcttctcccggatggagaccaagctcatcacgtggggggcagacaccgccgcgtgcggtgacatcatcaacgcttgcccgtctccgcccgtaagggccgggagatattgctcgggccagccgacggaatggtctccaagggttggagattgctggcgcccatcacagcgtacgcccagcaaacaaggggcctcctagggtgtataatcaccacctgactggccgggacaaaaaccaagcggagggtgaggtccagattgtgtcaactgctacccaaaccttcttggcaacgtgcatcaatggggtatgctggactgtctaccacggggccgggacgaggccatcgcatcacccaagggtcctgtcatccagatgtacaccaatgtagaccaggaccttgtgggctggcccgcccctcaaggtacccgctcattggcaccctgcacctgcggctcctcggacctttacctggtcacgaggccgccgacgtcatccccgtgcgcaggcggggtgatagcaggggcagcttgctttcgccccggcccatttcttacttgaaaggctcctcagggggtccgctgttgtgccccgcgggacacgccgtaggctattcagggccgcggtgtgcacccgtggagtggctaaggcggtggactttatccctgtggagaacctagagacaaccatgaggtccccggtgtttacggacaactcctccccaccagcagtgccccagagcttccaagtggccacctgcatgctcccacaggcagcggcaagagcaccaaggtcccggctgcatacgcagcccagggctacaaggtgctagtgctcaacccttctgttgctgcaacactgggctttggtgcttacatgccaaggctcatggggtcgatcctaacatcaggaccggggtgagaacaattaccactggcagccccatcacgtactccacctacggcaagttccttgccgacggcgggtgctcagggggtgcttatgacataataatttgtgcgagtgccactccacggatgccacatccatcttgggcatcggcaccgtccttgatcaagcagagactgcgggggcgagactggttgtgctcgccaccgctacccctccgggctccatcactgtgcccatcctaatatcgaggaggttgctctgtccaccaccggagagatccctttctacggcaaggctatccccctcgaagtgatcaagggggggagacatctcatcttctgtcactcaaagaggaagtgcgacgagctcgccgcaagctggtcgcattgggcatcaatgccgtggcttactaccgcggtcttgacgtgtctgtcattccgaccagcggcgatgttgtcgtcgtggcaactgatgccctcatgaccggctataccggcgacttcactcggtgatagactgcaacacgtgtgtcacccagacagtcgatttcagccttgaccctaccttcaccattgagacaaccacgcttccccaggatgccgtctcccgcactcaacgtcggggcaggactggcagggggaagtaggcatctacagatttgtggcaccgggggagcgcccctccggtatgttcgactcgtccgtcctctgtgagtgctatgacgcgggctgtgcttggtatgagctcacgcccgccgagactacagttaggtacgagcgtacatgaacaccccggggcttcccgtgtgccaggaccatcttgagttttgggagggcgtctttacgggcctcacccatatagatgcccacttcctatctcagacaaagcagagtggggaaaactttccttaccggtagcgtaccaagccaccgtgtgcgctaggtctcaagcccctcccccatcgtgggaccagatgtggaagtgtttgatccgcctcaaacccaccctcaatgggccaacacccctgctatacagactggcgctgttcagaatgaagtcaccctgacgcacccaatcaccaagtacatcatgacatgtatgtcggctgac

SEQ ID NO: 663 - DNA, 4881 bp, Hepatitis C virus
aacaccaaccgtcgcccacaggacgttaagttcccgggtggcggtcagatcgttggtggagtttacttgttgccgcgcaggggccctagattgggtgtgcgcgcgacgaggaagacttccgagcggtgcaacctcgaggtagacgtcagcctatccccaaggcgcgtcggcccgagggcaggacctgggctcagcccgggtatccttggcccctctatggtaatgagggctgcgggtgggcgggatggctcctgctccccgtggctctcggcctagctggggccccacagacccccggcgtaggtcgcgcaatttgggtaaggtcatcgatacccttacgtgcggcttcgccgacctcatggggtacataccgctcgtcggcgcccctcttggagcgctgccagggccctggcgcatggcgtccgggttctggaagacggcgtgaactatgcaacagggaaccttcctggttgctctttttctatcttccttctggccctactctcttgcttgactgtgccccttcggcctaccaagtgcgcaactccacggggctctaccatgtcaccaatgattgccctaactcgagtattgtgtacgaggcggctgatgccatcctgcacattccggggtgtgtcccttgcgttcgcgagggtaacgcctgaggtgctgggtgccgataacccccacggtggccaccagggacggcaaactccccacgacgcagctacgacgtcacatcgatctgcttgtcgggagcgccaccctttgttcggccctctacgtggggacttgtgcgggtctgtctttcttgtcggtcagctgttcaccttctctccgaggctccactggacgacgcagggctgcaattgttccatctatcccggccatataacgggtcaccgcatggcatgggatatgatgatgaactgtcccctacgacggcattggtagtagctcagctgctccggatcccacaagccatcctggacatgatcgctggtgctcactggggagtcctggcgggcatagcgtatttctccatggtggggaactggcgaaggtcctggtagtgctgctgctatttgctggcgttgacgcgggcacccacgtcaccgggggaagcgccgcccacgctgcgtctggttttgctcacctcctcacacgaggtgccaagcagaacatccagctgatcaacacaacggcagttggcacatcaataggacggccttgaactgcaatgataacctcaacaccggctggatagcagggcttttctattaccacaaattcaactcttcaggctgtcctcagaggttggccagcgccgacccctcaccgactttgaccagggctggggccctatcagtcatgccagtgtaaccggctccgaccaacgcccctactgctggcactaccccccaagaccttgcggtattgtgcccgcaaagagcgtgtgtggcccggatattgcttcactcctagccccgttgttgtgggaacgaccgacagggcgggcgtgcctacctacaactggggcgcgaatgaaacggacgttttcgtccttaacaacaccaggccaccgcggggcaatggttcggttgcacctggatgaactcaactggatttaccaaggtgtgcggagcgcccccttgtgtcatcgggggggggggcaacaacaccttgtactgccctactgattgtttccgcaagcatccggaagccacatactctcgtgcggctccggtccctggcttacacccaggtgcctggtcgactacccgtataggctttggcactatccttgtaccatcaactacaccatatttaaagtcaggatgtatgtgggaggggtcgagcacggctggaagctgcctgcaactggacgcggggtgaacgttgtgatctagaagacagggacaggtccgagctcagcccgttgctgttgtctaccacacagtggcaggtccttccgtgttccttcacgaccctgccagccttatcactggcctcatccacctccatcagaacattgtggacgtgcagtacttgtacggggtggggtcaagcatcgcgtcctgggccatcaagtgggagtacgtcgttctcctgttccttctgcttgcagaccgcgcgtctgctcctgcttgtggatgatgttactcatatcccaagtggaggcggctttggagaacctcataacactcaatgcagcatccctggccgggacgcacggccttgtgtccttcctcgtgttcttctgctttgcatgtacctgaagggtaggtgggtgcccggagcggtctacgccctctacgggatgtggcctctcctcctgctcctgctggcgttgcctcaacgggcatacgcgctggacacggaggtggccgcgtcgtgtgcggcgttgtgcttgtcgggttaatggcgctgactctgtcaccatattacaagcgctatatcagctggtgcttatggtggcttcagtattttctgaccagagtagaagcgcaacttcacgtgtgggttccccccctcaacgccgaggggggcgtgacgctgtcatcttactcatgtgtgttgtacacccgactctggtatttgacatcaccaaacagctgctggccgtcttcggacccctttggattcttcaagccagtctgcttaagtcccctacttcgtgcgcgttcaaggccttctccggatctgcgcgttagcgcggaagatggtcggaggccactacgtgcaaatggccatcatcaagttgggggcgcttactggcacctatgtttataaccatctcactcccctcgggactgggcgcacaacggcctgcgagatctggccgtggctgtagagccagtcgtcttctcccggatggagaccaagctcatcacgtggggagcagacaccgccgcgtgcggtgacatcatcaacgcttgcccgtctccgcccgtaagggccgggagatactgctcgggccagccgacggaatggtctccaagggttggagattgctggcgcccatcacagcgtacgcccagcaaacaaggggcctcctagggtgtataatcaccacctgactggccgggacaaaaaccaagcggagggtgaggtccagattgtgtcaactgctacccaaactttcttggcaacgtgcatcaatggggtatgttggactgtctaccacggggccgggacgaggccatcgcatcacccaagggtcctgtcatccagatgtacaccaatgtagaccaggaccttgtgggctggcccgcccctcaaggtacccgctcattggcaccctgcacctgcggctcctcggacctttacctggtcacgaggccgccgatgtcatccccgtgcgcaggcggggtgatagcaggggcagcttgctttcgccccggcccatctcttacttgaaaggctcctcagggggtccgctgttgtgccccgcgggacacgccgtaggctattcagggccgcggtgtgcacccgtggagtggctaaggcggtggactttatccctgtggagaacctagagacaaccatgaggtccccggtgtttacggacaactcctccccaccagcagtgccccagagcttccaagtggccacctgcatgctcccacaggcagcggcaagagcaccaaggtcccggctgcatacgcagcccagggctacaaggtgctagtgctcaacccttctgttgctgcaacactgggctttggtgcttacatgccaaggctcatggggtcgatcctaacatcaggaccggggtgagaacaattaccactggcagccccatcacgtactccacctacggcaagttccttgccgacggcgggtgctcagggggtgcttatgacataataatttgtgcgagtgccactccacggatgccacatccatcttgggcatcggcactgtccttgatcaagcagagactgcgggggcgagactggttgtgctcgccaccgctacccctccgggctccatcactgtgcccatcctaatatcgaggaggttgccctgtccaccaccggagagatccctttttacggcaaggctatccccctcgaagtgatcaagggggggagacatctcatcttttgtcactcaaagaggaagtgcgacgagctcgccgcaagctggtcgcattgggcatcaatgccgtggcttactaccgcggccttgacgtgtctgtcattccgaccagcggcgatgttgtcgtcgtggcaactgatgctctcatgaccggctataccggcgacttcactcggtgatagactgcaatacgtgtgtcacccagacagtcgatttcagccttgaccctaccttcaccattgagacaaccacgcttccccaggatgctgtctcccgcactcaacgtcggggcaggactggcagggggaagtgggcatctacagatttgtggcaccgggggagcgcccctccggtatgttcgactcgtccgtcctctgtgagtgctatgacgcgggctgtgcttggtatgagctcacgcccgccgagactacagttaggtacgagcgtacatgaacaccccggggcttcccgtgtgccaggaccatcttgagttttgggagggcgtctttacgggcctcacccatatagatgcccacttcctatctcagacaaagcagagtggggaaaactttccttaccggtagcgtaccaagccaccgtgtgcgctagggctcaagcccctcccccatcgtgggaccagatgtggaagtgtttgatccgcctcaaacccaccctcaatgggccaacacccctgctatacagactggcgctgttcagaatgaaatcaccctgacgcacccaatcaccaaatacatcatgacatgtatgtcggctgac

SEQ ID NO: 664 - DNA, 4881 bp, Hepatitis C virus
aacaccaaccgtcgcccacaggacgtcaagttcccgggtggcggtcagatcgttggtggagtttacttgttgccgcgcaggggccctagattgggtgtgcgcgcgacgaggaagacttccgagcggtgcaacctcgaggtagacgtcagcctatccccaaggcgcgtcggcccgagggcaggacctgggctcagcccgggtatccttggcccctctatggtaatgagggctgcgggtgggcgggatggctcctgctccccgtggctctcggcctagctggggccccacagacccccggcgtaggtcgcgcaatttgggtaaggtcatcgatacccttacgtgcggcttcgccgacctcatggggtacataccgctcgtcggcgcccctcttggagcgctgccagggccctggcgcatggcgtccgggttctggaagacggcgtgaactatgcaacagggaaccttcctggttgctctttctctatcttccttctggccctgctctcttgcctgactgtgccccttcggcctaccaagtgcgcaactccacggggctctaccatgtcaccaatgattgccctaactcgagtattgtgtacgaggcggctgatgccatcctgcacattccggggtgtgtcccttgcgttcgcgagggtaacgcctgaggtgctgggtgccgataacccccacggtggccaccagggacggcaaactccccacgacgcagctacgacgtcacatcgatctgcttgtcgggagcgccaccctttgttcggccctctacgtggggacctgtgcgggtctgtctttcttgtcggtcagctgttcaccttctctccgaggctccactggacgacgcagggctgcaattgttccatctatcccggccatataacgggtcaccgcatggcatgggatatgatgatgaactgtcccctacgacggcattggtagtagctcagctgctccggatcccacaagccatcttggacatgatcgctggtgctcactggggagtcctggcgggcatagcgtatttctccatggtggggaactggcgaaggtcctggtagtgctgctgctatttgccggcgttgacgcggccacccacgtcaccgggggaagcgccgcccgcgctgcgtctggccttactagcatcttcacaccaggtgccaagcagaacatccagctgatcaacacaacggcagttggcacatcaataggacggccttgaactgcaatgataacctcgacaccggctggatagcagggcttttctattacaacaaattcaactcttcaggctgtccccagaggttggccagcgccgacccctcaccgactttgaccagggctggggccctatcagtcatgccagcgtaaacggctccgaccaacgcccctactgctggcactaccccccaagaccttgcggtattgtgcccgcaaagagcgtgtgtggcccggatattgcttcactcccagccccgttgttgtgggaacgaccgacagggcgggcgtgcctacttacaactggggcgcgaatgaaacggacgttttcgtccttaacaacaccaggccaccgcggggcaatggttcggttgcacctggatgaactcaaccggattcaccaaagtgtgcggagcgcccccttgtgtcatcgggggggggggcaacaacaccttgtactgccctactgattgtttccgcaagcatccggaagccacatactctcgtgcggctccggtccctggcttacacccaggtgcctggtcaactatccgtataggctttggcactatccttgtaccatcaactacaccatatctaaagtcaggatgtatgtgggaggggtcgagcacggctggaagctgcctgcaactggacgcggggtgaacgttgtgatctggaagacagggacaggtccgagctcagcccgttgctgttgtctaccacacagtggcaggtccttccgtgttccttcacgaccctgccagccctatcactggcctcatccacctccatcagaacattgtggacgtgcagtacttgtacggggtggggtcaagcatcgcgtcctgggccatcaagtgggagtacgtcgtcctcctgttccttctgcttgcagaccgcgcgtctgctcctgcttgtggatgatgttactcatatcccaagtggaggcggctttggagaacctcataacactcaatgcagcatctctggccgggacgcacggccttgtgtccttccttgtgttcttctgctttgcatgtacctgaagggtaggtgggtgcccggagcggtctacgccctctacgggatgtggcctctcctcctgctcctgctggcgttgcctcaacgggcatacgcgctggacacggaggtggccgcgtcgtgtgcggcgtcgtgcttgtcgggttaatggcgctgactctgtcaccatattacaagcgctatatcagctggtgcttatggtggcttcagtattttctgaccagagtagaagcgcaacttcacgtgtgggttccccccctcaacgccgaggggggcgtgacgctgtcatcttactcatgtgtgttgtacacccgactctggtgtttgacatcaccaaacagctgctggccgtcttcggacccctttggattcttcaagccagtctgcttaagtcccctacttcgtgcgcgttcaaggccttctccggatctgcgcgttagcgcggaagatggtcggaggccactacgtgcaaatggccatcatcaagttgggggcgcttactggcacctatgtttacaaccatctcactcccctcgggactgggcgcacaacggcctgcgagatctggccgtggctgtagagccagtcgtcttctcccggatggagaccaagctcatcacgtgggaggcagacaccgccgcgtgcggtgacatcatcaacgcttgcccgtctccgcccgtaagggccgggagatactgctcgggccagccgacggaatggtctccaagggttggagattgctggcgcccatcacagcgtacgcccagcaaacaaggggcctcctagggtgtataatcaccacctgaccggccgggacaaaaaccaagcggagggtgaggtccagattgtgtcaactgctacccaaaccttcttggcaacgtgcatcaatggggtatgctggactgtctaccacggggccgggacgaggccatcgcatcacccaagggtcctgtcatccagatgtacaccaatgtagaccaggaccttgtgggttggcccgcccctcaaggtacccgctcatgggcaccctgcacctgcggctcctcggacctttacctggtcacgaggccgccgatgtcatccccgtgcgcaggcggggtgatagcaggggcagcttgctttcgccccggcccatttcttacttgaaaggctcctcagggggtccgctgttgtgccccgcgggacacgccgtaggctattcagggccgcggtgtgcacccgtggagtggctaaggcggtggactttatccctgtggagaacctagagacaaccatgaggtccccggtgtttacggacaactcctccccaccagcagtgccccagagcttccaagtggccacctgcatgctcccacaggcagcggcaagagcaccaaggtcccggctgcatacgcagcccagggctacaaggtgctagtgctcaacccttctgttgctgcaacactgggctttggtgcttacatgccaaggctcatggggtcgatcctaacatcaggaccggggtgagaacaattaccactggcagccccatcacgtactccacctacggcaagttccttgccgacggcgggtgctcagggggtgcttatgacataataatttgtgcgagtgccactccacggatgccacatccatcttgggcatcggcactgtccttgatcaagcagagactgcgggggcgagactggttgtgctcgccactgctacccctccgggctccatcactgtgcccatcctaatatcgaggaggttgctctgtccaccaccggagagatccctttctacggcaaggctatccccctcgaagtgatcaagggggggagacatctcatcttctgccactcaaagaggaagtgcgacgagctcgccgcaagctggtcgcattgggcatcaatgccgtggcttactaccgcggtcttgacgtgtctgtcattccgaccagcggcgatgttgtcgtcgtggcaactgatgccctcatgaccggctataccggcgacttcactcggtgatagactgcaacacgtgtgtcacccagacagtcgatttcagccttgaccctaccttcaccattgagacaaccacgcttccccaggatgccgtctcccgcactcaacgtcggggcaggactggcagggggaagtaggcatctacagatttgtggcaccgggggagcgcccctccggtatgttcgactcgtccgtcctctgtgagtgctatgacgcgggctgtgcttggtatgagctcacgcccgccgagactacagttaggtacgagcgtacatgaacaccccggggcttcccgtgtgccaggaccatcttgagttttgggagggcgtctttacgggcctcacccatatagatgcccacttcctatctcagacaaagcagagtggggaaaactttccttaccggtagcgtaccaagccaccgtgtgcgctagggctcaagcccctcccccatcgtgggaccagatgtggaagtgtttgatccgcctcaaacccaccctcaatgggccaacacccctgctatacagactggcgctgttcagaatgaagtcaccctgacgcacccaatcaccaaatacatcatgacatgtatgtcggctgac

SEQ ID NO: 665 - DNA, 4881 bp, Hepatitis C virus
aacaccaaccgtcgcccacaggacgtcaagttcccgggtggcggtcagatcgttggtggagtttacttgttgccgcgcaggggccccagattgggtgtgcgcgcgacgaggaagacttccgagcggtgcaacctcgaggtagacgtcagcctatccccaaggcgcgtcggcccgagggcaggacctgggctcagcccgggtatccttggcccctctatggtaatgagggctgcgggtgggcgggatggctcctgctccccgtggctctcggcctagctggggccccacagacccccggcgtaggtcgcgcaatttgggtaaggtcatcgatacccttacgtgcggcttcgccgacctcatggggtacataccgctcgtcggcgcccctcttggagcgctgccagggccctggcgcatggcgtccgggttctggaagacggcgtgaactatgcaacagggaaccttcctggttgctctttctctatcttccttctggccctgctctcttgcctgaccgtgccccttcggcctaccaagtgcgcaactccacggggctctaccatgtcaccaatgattgccctaactcgagtattgtgtacgaggcggctgatgccatcctgcacattccggggtgtgtcccttgcgtccgcgagggtaacgcctgaggtgttgggtgccgataacccccacggtggccaccagggacggcaaactccccacgacgcagctacgacgtcacatcgatctgcttgtcgggagcgccaccctttgttcggccctttacgtggggacctgtgcgggtctgtcttccttgtcggtcagctgttcaccttctctccgaggctccactggacgacgcagggctgcaattgttccatctatcccggccatataacgggtcaccgtatggcatgggatatgatgatgaactgtcccctacgacggcattggtagtagctcagctgctccggatcccacaagccatcttggacatgatcgctggtgctcactggggagtcctggcgggcatagcgtatttctccatggtggggaactggcgaaggtcctggtagtgctgctgctatttgccggcgttgacgcgaccacccacgtcaccgggggaagcgtcgcccgcactacgtctggtcttgctaatctcctcacaccaggtgccaagcagaacattcagctgatcaacacaacggcagttggcacatcaataggacggccttgaactgcaatgataacctcgacaccggttggatagcagggcttttctattacaacaaattcaactcttcaggctgtccccagaggttggccagcgccgacccctcaccgactttgaccagggctggggccctatcagtcatgccagcgtaaccggctccgaccaacgcccctactgctggcactaccccccaagaccttgcggtattgtgcccgcaaagagcgtgtgtggcccggatattgcttcactcccagccccgttgttgtgggaacgaccgacagggcgggcgtgcccacctacaactggggcgcgaatgaaacggacgttttcgtccttaacaacaccaggccaccgcggggcaatggttcggttgcacctggatgaactcaactggattcaccaaagtgtgcggagcgcccccttgtgtcatcgggggggggggcaacaacaccttgtactgccctactgattgtttccgcaagcatccggaagccacatactctcgtgcggcgccggtccctggcttacacccaggtgcctggtccactacccgtataggctttggcactatccttgtaccatcaactacaccatatctaaagtcaggatgtatgtgggaggggtcgagcacggctggaagctgcctgcaactggacgcggggtgaacgttgtgatctggaagacagggacaggtctgagctcagcccgttgctgttgtctaccacacagtggcaggtccttccgtgttccttcacgactctgccagccttatcactggcctcatccacctccatcagaacattgtggacgtgcagtacttgtacggggtggggtcaagcatcgcgtcctgggccatcaagtgggagtacgtcgttctcctgttccttctgcttgcagaccgcgcgtctgctcctgcttgtggatgatgttactcatatcccaagtggaggcggctttggagaaccttataacactcaatgcagcatccctggccgggacgcagggccttgtgtccttcctcgtgttcttctgctttgcatgtacctgaagggtaagtgggtgcccggagcggtctacgccctctacgggatgtggcctctcctcctgctcctgctggcgttgcctcaacgggcatacgcgctggacacggaggtggccgcgtcgtgtgcggcgctgtgcttgtcgggttaatggcgctgactctgtcaccatattacaagcactatatcagctggtgcttatggtggcttcagtattttctgaccagagtagaagcgcaatttcacgtgtgggttccccccctcaacgccgaggggggcgtgacgctgtcatcttactcatgtgtgttgtgcacccgactctggtatttgacatcaccaaacagctgctggccgtcttcggacccctttggattcttcaagccagtctgcttaagtcccctacttcgtgcgcgttcaaggccttctccggatctgcgcgttagcgcggaagatggtcggaggccactacgtgcaaatggtcatcatcaagttgggggcgcttactggcacctatgtttataaccatctcactcccctcgggactgggcgcacaacggcctgcgagatctggccgtggctgtagagccagtcgtcttctcccggatggagaccaagctcatcacgtggggggcagacaccgccgcgtgcggtgacatcatcaacgcttgcccgtctccgcccgtaagggccgggagatactgctcgggccagccgacggaatggtctccaagggttggagattgctggcgcccatcacagcgtacgcccagcaaacaaggggcctcctagggtgtataatcaccacctgactggccgggacaaaaaccaagcggagggtgaggtccagattgtgtcaactgctacccaaactttcttggcaacgtgcatcaatggggtatgctggactgtctaccacggggccgggacgaggccatcgcatcacccaagggtcctgtcatccagatgtacaccaatgtagaccaggaccttgtgggctggcccgcccctcaaggtacccgctcattggcaccctgcacctgcggctcctcggacctttacctggtcacgaggccgccgatgtcatccccgtgcgcaggcggggtgatagcaggggcagcttgctttcgccccggcccatctcttatttgaaaggctcctcagggggtccgctgttgtgccccgcgggacacgccgtaggctattcagggccgcggtgtgcacccgtggagtggctaaggcggtggactttatccctgtggagaacctagagacaaccatgaggtccccggtgtttacggacaactcctccccaccagcagtgccccagagcttccaagtggccacctgcatgctcccacaggcagcggcaagagcaccaaggtcccggctgcatacgcagcccagggctacaaggtgctagtgctcaacccttctgttgctgcaacactgggctttggtgcttacatgccaaggctcatggggtcgatcctaacatcaggaccggggtgagaacaattaccactggcagccccatcacgtactccacctacggcaagttccttgccgacggcgggtgctcagggggtgcttatgacataataatttgtgcgagtgccactccacggatgccacatctatcttgggcatcggcactgtccttgatcaagcagagactgcgggggcgagactggttgtgcttgccaccgctacccctccgggctccatcactgtgcccatcctaatatcgaggaggttgctctgtccaccaccggagagatccctttctacggcaaggctatccccctcgaagtgatcaagggggggagacatctcatcttctgccactcaaagaggaagtgcgacgaactcgccgcaagttggtcgcattgggcgtcaatgccgtggcttactaccgcggtcttgacgtgtctgtcatcccgaccagcggcgatgttgtcgtcgtggcaactgatgctctcatgaccggctataccggcgacttcactcggtgatagactgcaacacgtgtgtcacccagacagtcgatttcagccttgaccctaccttcactattgagacaaccacgcttccccaggatgccgtctcccgcactcaacgtcggggcaggactggcagggggaagtaggcatctacagatttgtggcaccgggggagcgcccctccggtatgttcgactcgtccgtcctctgtgagtgctatgacgcgggctgtgcttggtatgagctcacgcccgccgagactacagttaggtacgagcgtacatgaacaccccggggcttcccgtgtgccaggaccatcttgagttttgggagggcgtctttacgggcctcacccatatagatgcccacttcctatctcagacaaagcagagtggggaaaactttccttaccggtagcgtaccaagccaccgtgtgcgctagggctcaagcccctcccccatcgtgggaccagatgtggaagtgtttgatccgcctcaagcccaccctcaatgggccaacacccctgctatacagactggcgctgttcagaatgaagtcaccctgacgcacccgatcaccaaatacatcatgacatgtatgtcggctgac

SEQ ID NO: 666 - DNA, 4881 bp, Hepatitis C virus
aacaccaaccgtcgcccacaggacgtcaagttcccgggtggcggtcagatcgttggtggagtttacttgttgccgcgcaggggccccagattgggtgtgcgcgcgacgaggaagacttccgagcggtgcaacctcgaggtagacgtcagcctatccccaaggcgcgtcggcccgagggcaggacctgggctcagcccgggtatccttggcccctctatggtaatgagggctgcgggtgggcgggatggctcctgctccccgtggctctcggcctagctggggccccacagacccccggcgtaggtcgcgcaatttgggtaaggtcatcgatacccttacgtgcggcttcgccgacctcatggggtacataccgctcgtcggcgcccctcttggagcgctgccagggccctggcgcatggcgtccgggttctggaagacggcgtgaactatgcaacagggaaccttcctggttgctctttctctatcttccttctggccctgctctcttgcctgactgtgccccttcggcctaccaagtgcgcaactccacggggctctaccatgtcaccaatgattgccctaactcgagtattgtgtacgaggcggctgatgccatcctgcacattccggggtgtgtcccttgcgtccgcgagggtaacgcctgaggtgttgggtgccgataacccccacggtggccaccagggacggcaaactccccacgacgcagctacgacgtcacatcgatctgcttgtcgggagcgccaccctttgttcggccctttacgtggggacctgtgcgggtctgtctttcttgtcggtcagctgttcaccttctctccgaggctccactggacgacgcagggctgcaattgttccatctatcccggccatataacgggtcaccgcatggcatgggatatgatgatgaactgtcccctacgacggcattggtagtagctcagctgctccggatcccacaagccatcttggacatgatcgctggtgctcactggggagtcctggcgggcatagcgtatttctccatggtggggaactggcgaaggtcctggtagtgctgctgctatttgccggcgttgacgcgaccacccacgtcaccgggggaagcgtcgcccgcactacgtctggtcttactaatctcctcacaccaggtgccaagcagaacattcagctgatcaacacaacggcagttggcacatcaataggacggccttgaactgcaatgacaacctcgacaccggttggatagcagggcttttctattacaacaaattcaactcttcaggctgtccccagaggttggccagcgccgacccctcaccgactttgaccagggctggggccctatcagtcatgccagcgtaaccggctccgaccaacgcccctactgctggcactaccccccaagaccttgcggtattgtgcccgcaaagagcgtgtgtggcccggatattgcttcactcccagccccgttgttgtgggaacgaccgacagggcgggcgtgcccacctacaactggggcgcgaatgaaacggacgttttcgtccttaacaacaccaggccaccgcggggcaatggttcggttgcacctggatgaactcaactggattcaccaaagtgtgcggagcgcccccttgtgtcatcgggggggggggcaacaacaccttgtactgccctactgattgtttccgcaagcatccggaagccacatactctcgtgcggctccggtccctggcttacacccaggtgcctggtccactacccgtataggctttggcactatccttgtaccatcaactacaccatatctaaagtcaggatgtatgtgggaggggtcgagcacggctggaagctgcctgcaactggacgcggggtgaacgttgtgatctggaagacagggacaggtctgagctcagcccgttgctgttgtctaccacgcagtggcaggtccttccgtgttccttcacgactctgccagccttatcactggcctcatccacctccatcagaacattgtggacgtgcagtacttgtacggggtggggtcaagcatcgcgtcctgggccatcaagtgggagtacgtcgttctcctgttccttctgcttgcagaccgcgcgtctgctcctgcttgtggatgatgttactcatatcccaagtggaggcggctttggagaaccttataacactcaatgcagcatccctggccgggacgcagggccttgtgtccttcctcgtgttcttctgctttgcatgtacctgaagggtaggtgggtgcccggagcggtctacgccctctacgggatgtggcctctcctcctgctcctgctggcgttgcctcaacgagcatacgcgctggacacggaggtggccgcgtcgtgtgcggcgctgtgcttgtcgggttaatggcgctgactctgtcaccatattacaagcactatatcagctggtgcttatggtggcttcagtacttcctgaccagagtagaagcgcaatttcacgtgtgggttccccccctcaacgccgaggggggcgtgacgctgtcatcttactcatgtgtgttgtgcacccgactctggtatttgacatcaccaaacagctgctggccgtcttcggacccctttggattcttcaagccagtctgcttaagtcccctacttcgtgcgcgttcaaggccttctccggatctgcgcgttagcgcggaagatggtcggaggccactacgtgcaaatggccatcatcaagttgggggcgcttactggcacctatgtttataaccatctcactcccctcgggactgggcgcacaacggcctgcgagatctggccgtggctgtagagccagtcgtcttctcccggatggagaccaagctcatcacgtggggggcagacaccgccgcgtgcggtgacatcatcaacgcttgcccgtctccgcccgtaagggccgggagatactgctcgggccagccgacggaatggtctccaagggttggagattgctggcgcccatcacagcgtacgcccagcaaacaaggggcctcctagggtgtataatcaccacctgactggccgggacaaaaaccaagcggagggtgaggtccagattgtgtcaactgctacccaaactttcttggcaacgtgcatcaatggggtatgctggactgtctaccacggggccgggacgaggccatcgcatcacccaagggtcctgtcatccagatgtacaccaatgtagaccaggaccttgtgggctggcccgcccctcaaggtacccgctcattggcaccctgcacctgcggcccctcggacctttacctggtcacgaggccgccgatgtcatccccgtgcgcaggcggggtgatagcaggggcagcttgctttcgccccggcccatctcttacttgaaaggctcctcagggggtccgctgttgtgccccgcgggacacgccgtaggctattcagggccgcggtgtgcacccgtggagtggctaaggcggtggactttatccctgtggagaacctagagacaaccatgaggtccccggtgtttacggacaactcctccccaccagcagtgccccagagcttccaagtggccacctgcatgctcccacaggcagcggcaagagcaccaaggtcccggctgcatacgcagcccagggctacaaggtgctagtgctcaacccttctgttgctgcaacactgggctttggtgcttacatgccaaggctcatggggtcgatcctaacatcaggaccggggtgagaacaattaccactggcagccccatcacgtactccacctacggcaagttccttgccgacggcgggtgctcagggggtgcttatgacataataatttgtgcgagtgccactccacggatgccacatctatcttgggcatcggcactgtccttgatcaagcagagactgcgggggcgagactggttgtgcttgccaccgctacccctccgggctccatcactgtgcccatcctaatattgaggaggttgctctgtccaccaccggagagatccctttctacggcaaggctatccccctcgaagtgatcaagggggggagacatctcatcttctgccactcaaagaggaagtgcgacgagctcgccgcaagttggtcgcattgggcatcaatgccgtggcttactaccgcggtcttgacgtgtctgtcatcccgaccagcggcgatgttgtcgtcgtggcaactgatgctctcatgaccggctataccggcgacttcactcggtgatagactgcaacacgtgtgtcacccagacagtcgatttcagccttgaccctaccttcaccattgagacaaccacgcttccccaggatgccgtctcccgcactcaacgtcggggcaggactggcagggggaagtaggcatctacagatttgtggcaccgggggagcgcccctccggtatgttcgactcgtccgtcctctgtgagtgctatgacgcaggctgtgcttggtatgagctcacgcccgccgagactacagttaggtacgagcgtacatgaacaccccggggcttcccgtgtgccaggaccatcttgagttttgggagggcgtctttacgggcctcacccatatagatgcccacttcctatctcagacaaagcagagtggggaaaactttccttaccggtagcgtaccaagccaccgtgtgcgctagggctcaagcccctcccccatcgtgggaccagatgtggaagtgtttgatccgcctcaagcccaccctcaatgggccaacacccctgctatacagactggcgctgttcagaatgaagtcaccctgacgcacccaatcaccaaatacatcatgacatgtatgtcggctgac

SEQ ID NO: 667 - DNA, 4881 bp, Hepatitis C virus
aacaccaaccgtcgcccacaggacgtcaagttcccgggtggcggtcagatcgttggtggagtttacttgttgccgcgcaggggccccagattgggtgtgcgcgcgacgaggaagacttccgagcggtgcaacctcgaggtagacgtcagcctatccccaaggcgcgtcggcccgagggcaggacctgggctcagcccgggtatccttggcccctctatggtaatgagggctgcgggtgggcgggatggctcctgctccccgtggctctcggcctagctggggccccacagatccccggcgtaggtcgcgcaatttgggtaaggtcatcgatacccttacgtgcggcttcgccgacctcatggggtacataccgctcgtcggcgcccctcttggagcgctgccagggccctggcgcatggcgtccgggttctggaagacggcgtgaactatgcaacagggaaccttcctggttgctctttctctatcttccttctggccctgctctcttgcctgaccgtgccccttcggcctaccaagtgcgcaactccacggggctctaccatgtcaccaatgattgccctaactcgagtattgtgtacgaggcggctgatgccatcctgcacattccggggtgtgtcccttgcgtccgcgagggtaacgcctgaggtgttgggtgccgataacccccacggtggccaccagggacggcaaactccccacgacgcagctacgacgtcacatcgatctgcttgtcgggagcgccaccctttgttcggccctctacgtggggacctgtgcgggtctgcctttcttgtcggtcagctgttcaccttctctccgaggctccactggacgacgcagggctgcaattgttccatctatcccggccatataacgggtcaccgcatggcatgggatatgatgatgaactgtcccctacgacggcattggtagtagctcagctgctccggatcccacaagccatcttggacatgatcgctggtgctcactggggagtcctggcgggcatagcgtatttctccatggtggggaactggcgaaggtcctggtagtgctgctgctatttgccggcgttgacgcgaccacccacgtcaccgggggaagcgtcgcccgcactacgtctggtcttgctaatctcctcacaccaggtgccaagcagaacattcagctgatcaacacaacggcagttggcacatcaataggacggccttgaactgcaatgataacctcgacaccggctggatagcagggcttttctattacaacaaattcaactcttcaggctgtccccagaggttggccagcgccgacccctcaccgactttgaccagggctggggccctatcagtcatgccagcgtaaccggctccgaccaacgcccctactgctggcactaccccccaagaccttgcggtattgtgcccgcaaagagcgtgtgtggcccggatattgcttcactcccagccccgttgttgtgggaacgaccgacagggcgggcgtgcccacctacaactggggcgcgaatgaaacggacgttttcgtccttaacaacaccaggccaccgcggggcaatggttcggttgcacctggatgaactcaaccggattcaccaaagtgtgcggagcgcccccttgtgtcatcgggggggggggcaacaacaccttgtactgccctactgattgtttccgcaagcatccggaagccacatactctcgtgcggttccggtccctggcttacacccaggtgcctggtccactacccgtataggctttggcactatccttgtaccatcaactacaccatatctaaagtcaggatgtatgtgggaggggtcgagcacggctggaagctgcctgcaactggacgcggggtgaacgttgtgatctggaagacagggacaggtccgagctcagcccgttgctgttgtctaccacacagtggcaggtccttccgtgttccttcacgactctgccagccttatcactggcctcatccacctccatcagaacattgtggacgtgcagtacttgtacggggtggggtcaagcatcgcgtcctgggccatcaagtgggagtacgtcgttctcctgttccttctgcttgcagaccgcgcgtctgctcctgcttgtggatgatgttactcatatcccaagtggaggcggctttggagaacctcataacactcaatgcagcatccctggccgggacgcacggccttgtgtccttcctcgtgttcttctgctttgcatgtacctgaagggtaggtgggtgcccggagcggtctacgccctctacgggatgtggcctctcctcctgctcctgctggcgttgcctcaacgggcatacgcgctggacacggaggtggccgcgtcgtgtgcggcgctgtgcttgtcgggttaatggcgctgactctgtcaccatattacaagcactatatcagctggtgcttatggtggcttcagtattttctgaccagagtagaagcgcaatttcacgtgtgggttccccccctcaacgccgaggggggcgtgacgctgtcatcttactcatgtgtgttgtgcacccgactctggtatttgacatcaccaaacagctgctggccgtcttcggacccctttggattcttcaagccagtctgcttaagtcccctacttcgtgcgcgttcaaggccttctccggatctgcgcgttagcgcggaagatggtcggaggccactacgtgcaaatggccatcatcaagttgggggcgcttactggcacctatgtttataaccatctcactcccctcgggactgggcgcacaacggcctgcgagatctggccgtggctgtagagccagtcgtcttctcccggatggagaccaagctcatcacgtggggggcagacaccgccgcgtgcggtgacatcatcaacgcttgcccgtctccgcccgtaagggccgggaggtactgctcgggccagccgacggaatggtctccaagggttggagattgctggcgcccatcacagcgtacgcccagcaaacaaggggcctcctagggtgtataatcaccacctgactggccgggacaaaaaccaagcggagggtgaggtccagattgtgtcaactgctacccaaactttcttggcaacgtgcatcaatggggtatgctggactgtctaccacggggccgggacgaggccatcgcatcacccaagggtcctgtcatccagatgtacaccaatgtagaccaggaccttgtgggctggcccgcccctcaaggtacccgctcgttggcaccctgcacctgcggctcctcggacctttacctggtcacgaggccgccgatgtcatccccgtgcgcaggcggggtgatagcaggggcagcttgctttcgccccggcccatctcttacttgaaaggctcctcagggggtccgctgttgtgccccgcgggacacgccgtaggctattcagggccgcggtgtgcacccgtggagtggctaaggcggtggattttatccctgtggagaacctagagacaaccatgaggtccccggtgtttacggacaactcctccccaccagcagtgccccagagcttccaagtggccacctgcatgctcccacaggcagcggcaagagcaccaaggtcccggctgcatacgcagcccagggctacaaggtgctagtgctcaacccttctgttgctgcaacactgggctttggtgcttacatgccaaggctcatggggtcgatcctaacatcaggaccggggtgagaacaattaccactggcagccccatcacgtactccacctacggcaagttccttgccgacggcgggtgctcagggggtgcttatgacataataatttgtgcgagtgccactccacggatgccacatctatcttgggcatcggcactgtccttgatcaagcagagactgcgggggcgagactggttgtgcttgccaccgctacccctccgggctccatcactgtgcccatcctaatatcgaggaggttgctctgtccaccaccggagagatccctttctacggcaaggctatccccctcgaagtgatcaagggggggagacatctcatcttctgccactcaaagaggaagtgtgacgagctcgccgcaagttggtcgcattgggcatcaatgccgtggcttactaccgcggtcttgacgtgtctgtcatcccgaccagcggcgatgttgtcgtcgtggcaactgatgctctcatgaccggctataccggcgacttcactcggtgatagactgcaacacgtgtgtcacccagacagtcgatttcagccttgaccctaccttcaccattgagacaaccacgcttccccaggatgccgtctcccgcactcaacgtcggggcaggactggcagggggaagtaggcatctacagatttgtggcaccgggggagcgcccctccggtatgttcgactcgtccgtcctctgtgagtgctatgacgcgggctgtgcttggtatgagctcacgcccgccgagactacagttaggtacgagcgtacatgaacaccccggggcttcccgtgtgccaggaccatcttgagttttgggagggcgtctttacgggcctcacccatatagatgcccacttcctatctcagacaaagcagagtggggaaaactttccttaccggtagcgtaccaagccaccgtgtgcgctagggctcaagcccctcccccatcgtgggaccagatgtggaagtgtttgatccgcctcaaacccaccctcaatgggccaacacccctgctatacagactggcgctgttcagaatgaagtcaccctgacgcacccaatcaccaaatacatcatgacatgtatgtcggctgac

SEQ ID NO: 668 - DNA, 4881 bp, Hepatitis C virus
aacaccaaccgtcgcccacaggacgtcaagttcccgggtggcggtcagatcgttggtggagtttacttgttgccgcgcaggggccccagattgggtgtgcgcgcgacgaggaagacttccgagcggtgcaacctcgaggtagacgtcagcctatccccaaggcgcgtcggcccgagggcaggacctgggctcagcccgggtatccttggcccctctatggtaatgagggctgcgggtgggcgggatggctcctgctccccgtggctctcggcctagctggggccccacagacccccggcgtaggtcgcgcaatttgggtaaggtcatcgatacccttacgtgcggcttcgccgacctcatggggtacataccgctcgtcggcgcccctcttggagcgctgccagggccctggcgcatggcgtccgggttctggaagacggcgtgaactatgcaacagggaaccttcctggttgctctttctctatcttccttctggccctgctctcttgcctgactgtgccccttcggcctaccaagtgcgcaactccacggggctctaccatgtcaccaatgattgccctaactcgagtattgtgtacgaggcggctgatgccatcctgcacattccggggtgtgtcccttgcgtccgcgagggtaacgcctgaggtgttgggtgccgataacccccacggtggccaccagggacggcaaactccccacgacgcagctacgacgtcacatcgatctgcttgtcgggagcgccaccctttgttcggccctttacgtggggacctgtgcgggtctgtctttcttgtcggtcagctgttcaccttctctccgaggctccactggacgacgcagggctgcaattgttccatctatcccggccatataacgggtcaccgcatggcatgggatatgatgatgaactgtcccctacgacggcattggtagtagctcagctgctccggatcccacaagccatcttggacatgatcgctggtgctcactggggagtcctggcgggcatagcgtatttctccatggtggggaactggcgaaggtcctggtagtgctgctgctatttgccggcgttgacgcgaccacccacgtcaccgggggaagcgtcgcccgcactacgtctggtcttactaatctcctcacaccaggtgccaagcagaacattcagctgatcaacacaacggcagttggcacatcaataggacggccttgaactgcaatgataacctcgacaccggttggatagcagggcttttctattacaacaaattcaactcttcaggctgtccccagaggttggccagcgccgacccctcaccgactttgaccagggctggggccctatcagtcatgccagcgtaaccggctccgaccaacgcccctactgctggcactaccccccaagaccttgcggtattgtgcccgcaaagagcgtgtgtggcccggatattgcttcactcccagccccgttgttgtgggaacgaccgacagggcgggcgtgcccacttacaactggggcgcgaatgaaacggacgttttcgtccttaacaacaccaggccaccgcggggcaatggttcggttgcacctggatgaactcaactggattcaccaaagtgtgcggagcgcccccttgtgtcatcgggggggggggcaacaacaccttgtactgccctactgattgtttccgcaagcatccggaagccacatactctcgtgcggctccggtccctggcttacacccaggtgcctggtccactacccgtataggctttggcactatccttgtaccatcaactacaccatatctaaagtcaggatgtatgtgggaggggtcgagcacggctggaagctgcctgcaactggacgcggggtgaacgttgtgatctggaagacagggacaggtctgagctcagcccgttgctgttgtctaccacacagtggcaggtccttccgtgttccttcacgactctgccagccttatcactggcctcatccacctccatcagaacattgtggacgtgcagtacttgtacggggtggggtcaagcatcgcgtcctgggccatcaagtgggagtacgtcgttctcctgttccttctgcttgcagaccgcgcgtctgctcctgcttgtggatgatgttactcatatcccaagtggaggcggctttggagaaccttataacactcaatgcagcatccctggccgggacgcagggccttgtgtccttcctcgtgttcttctgctttgcatgtacctgaagggtaggtgggtgcccggagcggtctacgccctctacgggatgtggcctctcctcctgctcctgttggcgttgcctcaacgggcatacgcgctggacacggaggtggccgcgtcgtgtgcggcgctgtgcttgtcgggttaatggcgctgactctgtcaccatattacaagcactatatcagctggtgcttatggtggcttcagtattttctgaccagagtagaagcgcaatttcacgtgtgggttccccccctcaacgccgaggggggcgtgacgctgtcatcttactcatgtgtgttgtgcacccgactctggtatttgacatcaccaaacagctgctggccgtcttcggacccctttggattcttcaagccagtctgcttaagtcccctacttcgtgcgcgttcaaggccttctccggatctgcgcgttagcgcggaagatggtcggaggccactacgtgcaaatggccatcatcaagttgggggcgcttactggcacctatgtttataaccatctcactcctctcgggactgggcgcacaacggcctgcgggatctggccgtggctgtagagccagtcgtcttctcccggatggagaccaagctcatcacgtggggggcagacaccgccgcgtgcggtgacatcatcaacgcttgcccgtctccgcccgtaagggccgggagatactgctcgggccagccgacggaatggtctccaagggttggagattgctggcgcccatcacagcgtacgcccagcaaacaaggggcctcctagggtgtataatcaccacctgactggccgggacaaaaaccaagcggagggtgaggtccagattgtgtcaactgctacccaaactttcttggcaacgtgcatcaatggggtatgctggactgtctaccacggggccgggacgaggccatcgcatcacccaagggtcctgtcatccagatgtacaccaatgtagaccaggaccttgtgggctggcccgcccctcaaggtacccgctcattggcaccctgcacctgcggctcctcggacctttacctggtcacgaggccgccgatgtcatccccgtgcgcaggcggggtgatagcaggggcagcttgctttcgccccggcccatctcttacttgaaaggctcctcagggggtccgctgttgtgccccgcgggacacgccgtaggctattcagggccgcggtgtgcacccgtggagtggctaaggcggtggactttatccctgtggagaacctagagacaaccatgaggtccccggtgtttacggacaactcctccccaccagcagtgccccagagcttccaagtggccacctgcatgctcccacaggcagcggcaagagcaccaaggtcccggctgcatacgcagcccagggctacaaggtgctagtgctcaacccttctgttgctgcaacactgggctttggtgcttacatgccaaggctcatggggtcgatcctaacatcaggaccggggtgagaacaattaccactggcagtcccatcacgtactccacctacggcaagttccttgccgacggcgggtgctcagggggtgcttatgacataataatttgtgcgagtgccactccacggatgccacatctatcttgggcatcggcactgtccttgatcaagcagagactgcgggggcgagactggttgtgcttgccaccgctacccctccgggctccatcactgtgcccatcctaatatcgaggaggttgctctgtccaccaccggagagatccctttctacggcaaggctatccccctcgaagtgatcaagggggggagacatctcatcttctgccactcaaagaagaagtgcgacgagctcgccgcaagttggtcgcattgggcatcaatgccgtggcttactaccgcggtcttgacgtgtctgtcatcccgaccagcggcgatgttgtcgtcgtggcaactgatgctctcatgaccggctataccggcgacttcactcggtgatagactgcaacacgtgtgtcacccagacagtcgatttcagccttgaccctaccttcaccattgagacaaccacgcttccccaggacgccgtctcccgcactcaacgtcggggcaggactggcagagggaagtaggcatctacagatttgtggcaccgggggagcgcccctccggtatgttcgactcgtccgtcctctgtgagtgctatgacgcgggctgtgcttggtatgagctcacgcccgccgagactacagttaggtacgagcgtacatgaacaccccggggcttcccgtgtgccaggaccatcttgagttttgggagggcgtctttacgggcctcacccatatagatgcccacttcctatctcagacaaagcagagtggggaaaactttccttaccggtagcgtaccaagccaccgtgtgcgctagggctcaagcccctcccccatcgtgggaccagatgtggaaatgtttgatccgcctcaagcccaccctcaatgggccaacacccctgctatacagactggcgctgttcagaatgaagtcaccctgacgcacccaatcaccaaatacatcatgacatgtatgtcggctgac

SEQ ID NO: 669 - DNA, 4881 bp, Hepatitis C virus
aacaccaaccgtcgcccacaggacgtcaagttcccgggtggcggtcagatcgttggtggagtttacttgttgccgcgcaggggccccagattgggtgtgcgcgcgacgaggaagacttccgagcggtgcaacctcgaggtagacgtcagcctatccccaaggcgcgtcggcccgagggcagaacctgggctcagcccgggtatccttggcccctctatggtaatgagggctgcgggtgggcgggatggctcctgctccccgtggctctcggcctagctggggccccacagacccccggcgtaggtcgcgcaatttgggtaaggtcatcgatacccttacgtgcggcttcgccgacctcatggggtacataccgctcgtcggcgcccctcttggagcgctgccagggccctggcgcatggcgtccgggttctggaagacggcgtgaactatgcaacagggaaccttcctggttgctctttctctatcttccttctggccctgctctcttgcctgactgtgccccttcggcctaccaagtgcgcaactccacggggctctaccatgtcaccaatgattgccctaactcgagtattgtgtacgaggcggctgatgccatcctgcacattccggggtgtgtcccttgcgtccgcgagggtaacgcctgaggtgttgggtgccgataacccccacggtggccaccagggacggcaaactccccacgacgcagctacgacgtcacatcgatctgcttgtcgggagcgccaccctttgttcggccctctacgtggggacctgtgcgggtctgtctttcttgtcggtcagctgttcaccttctctccgaggctccactggacgacgcagggctgcaattgttccatctatcccggccatataacgggtcaccgcatggcatgggatatgatgatgaactgtcccctacgacggcattggtagtagctcagctgctccggatcccacaagccatcttggacatgatcgctggtgctcactggggagtcctggcgggcatagcgtatttctccatggtggggaactggcgaaggtcctggtagtgctgctgctatttgccggcgttgacgcgaccacccacgtcaccgggggaagcgtcgcccgcactacgtctggtcttgctaatctcctcacaccaggtgccaagcaggacattcagctgatcaacacaacggcagttggcacatcaataggacggccttgaactgcaatgataacctcgacaccggctggatagcagggcttttctattacaacaaattcaactcttcaggctgtccccagaggttggccagcgccgacccctcaccgactttgaccagggctggggccctatcagtcatgccagcataaccggctccgaccaacgcccctactgctggcactaccccccaagaccttgcggtattgtgcccgcaaagagcgtgtgtggcccggatattgcttcactcccagccccgttgttgtgggaacgaccgacagggcgggcgtgcccacctacaactggggcgcgaatgaaacggacgttttcgtccttaacaacaccaggccaccgcggggcaatggttcggttgcacctggatgaactcaactggattcaccaaagtgtgcggagcgcccccttgtgtcatcgggggggggggcaacaacaccttgtactgccctactgattgtttccgcaagcatccggaagccacatactctcgtgcggctccggtccctggcttacacccaggtgcctggtccactacccgtataggctttggcactatccttgtaccatcaactacaccatatctaaagtcaggatgtatgtgggaggggtcgagcacggctggaagctgcctgcaactggacgcggggtgaacgttgtgatctggaagacagggacaggtctgagcttagcccgttgctgttgtctaccacacagtggcaggtccttccgtgttccttcacgactctgtcagccttatcactggcctcatccacctccatcagaacattgtggacgtgcagtacttgtacggggtggggtcaagcatcgcgtcctgggccatcaagtgggagtacgtcgttctcctgttccttctgcttgcagaccgcgcgtctgctcctgcttgtggatgatgttactcatatcccaagtggaggcggctttggagaacctcataacactcaatgcagcatccctggccgggacgcacggccttgtgtccttcctcgtgttcttctgctttgcatgtacctgaagggtaggtgggtgcccggagcggtctacgccctctacgggatgtggcctctcctcctgctcctgctggcgttgcctcaacgggcatacgcgctggacacggaggtggccgcgtcgtgtgcggcgctgtgcttgtcgggttaatggcgctgactctgtcaccatattacaagcactatatcagctggtgcttatggtggcttcagtattttctgaccagagtagaagcgcaatttcacgtgtgggttccccccctcaacgccgaggggggcgtgacgctgtcatcttactcatgtgtgttgtgcacccgactctggtatttgacatcaccaaacagctgctggccgtcttcggacccctttggattcttcaagccagtctgcttaagtcccctacttcgtgcgcgttcaaggccttctccggatctgcgcgttagcgcggaagatggtcggaggccactacgtgcaaatggccatcatcaagttgggggcgcttactggcacctatgtttataaccatctcactcccctcgggactgggcgcacaacggcctgcgagatctggccgtggctgtggagccagtcgtcttctcccggatggagaccaagctcatcacgtggggggcagacaccgccgcgtgcggtgacatcatcaacgcttgcccgtctccgcccgtaagggccgggagatactgctcgggccagccgacggaatggtctccaagggttggagattgctggcgcccatcacagcgtacgcccagcaaacaaggggcctcctagggtgtataatcaccacctgactggccgggacaaaaaccaagcggagggtgaggtccagattgtgtcaactgctacccaaactttcttggcaacgtgcatcaatggggtatgctggactgtctaccacggggccgggacgaggccatcgcatcacccaagggtcctgtcatccagatgtacaccaatgtagaccaggaccttgtgggctggcccgcccctcaaggtacccgctcattggcaccctgcacctgcggctcctcggacctttacctggtcacgaggccgccgatgtcatccccgtgcgcaggcggggtgatagcaggggcagcttgctttcgccccggcccatctcttacttgaaaggctcctcagggggtccgctgttgtgccccgcgggacacgccgtaggctattcagggccgcggtgtgcacccgtggagtggctaaggcggtggactttatccctgtggagaacctagagacaaccatgaggtccccggtgtttacggacaactcctccccaccagcagtgccccagagcttccaagtggccacctgcatgctcccacaggcagcggcaagagcaccaaggtcccggctgcatacgcagcccagggctacaaggtgctagtgctcaacccttctgttgctgcaacactgggctttggtgcttacatgccaaggctcatggggtcgatcctaacatcaggaccggggtgagaacaattaccactggcagccccatcacgtactccacctacggcaagttccttgccgacggcgggtgctcagggggtgcttatgacataataatttgtgcgagtgccactccacggatgccacatctatcttgggcatcggcactgtccttgatcaagcagagactgcgggggcgagactggttgtgcttgccaccgctacccctccgggctccatcactgtgcccatcctaatatcgaggaggttgctctgtccaccaccggagagatccctttctacggcaaggctatccccctcgaagtgatcaagggggggagacatctcatcttctgccactcaaagaggaagtgcgacgagctcgccgcaagttggtcgcattgggcatcaatgccgtggcttactaccgcggtcttgacgtgtctgtcatcccgaccagcggcgatgttgtcgtcgtggcaactgatgctctcatgaccggctataccggcgacttcactcggtgatagactgcaacacgtgtgtcacccagacagtcgatttcagccttgaccctaccttcaccattgagacaaccacgcttccccaggatgccgtctcccgcactcaacgtcggggcaggactggcagggggaagtaggcatctacagatttgtggcaccgggggagcgcccctccggtatgttcgactcgtccgtcctctgtgagtgctatgacgcgggctgtgcttggtatgagctcacgcccgccgagactacagttaggtacgagcgtacatgaacaccccggggcttcccgtgtgccaggaccatcttgagttttgggagggcgtctttacgggcctcacccatatagatgcccacttcctatctcagacaaagcagagtggggaaaactttccttaccggtagcgtaccaagccaccgtgtgcgctagggctcaagcccctcccccatcgtgggaccagatgtggaagtgtttgatccgcctcaaacccaccctcaatgggccaacacccctgctatacagactggcgctgttcagaatgaagtcaccctgacgcacccaatcaccaaatacatcatgacatgtatgtcggctgac

SEQ ID NO: 670 - DNA, 4881 bp, Hepatitis C virus
aacaccaaccgtcgcccacaggacgtcaagttcccgggtggcggtcagatcgttggtggagtttacttgttgccgcgcaggggccccagattgggtgtgcgcgcgacgaggaagacttccgagcggtgcaacctcgaggtagacgtcagcctatccccaaggcgcgtcggcccgagggcaggacctgggctcagcccgggtatccttggcccctctatggtaatgagggctgcgggtgggcgggatggctcctgctccccgtggctctcggcctagctggggccccacagacccccggcgtaggtcgcgcaatttgggtaaggtcatcgatacccttacgtgcggcttcgccgacctcatggggtacataccgctcgtcggcgcccctcttggagcgctgccagggccctggcgcatggcgtccgggttctggaagacggcgtgaactatgcaacagggaaccttcctggttgctctttctctatcttccttctggccctgctctcttgcctgactgtgccccttcggcctaccaagtgcgcaactccacggggctctaccatgtcaccaatgattgccctaactcgagtattgtgtacgaggcggctgatgccatcctgcacattccggggtgtgtcccttgcgtccgcgagggtaacgcctgaggtgttgggtgccgataacccccacggtggccaccagggacggcaaactccccacgacgcagctacgacgtcacatcgatctgcttgtcgggagcgccaccctttgttcggccctttacgtggggacctgtgcgggtctgtctttcttgtcggtcagctgttcaccttctctccgaggctccactggacgacgcagggctgcaattgttccatctatcccggccatataacgggtcaccgcatggcatgggacatgatgatgaactgtcccctacgacggcattggtagtagctcagctgctccggatcccacaagccatcttggacatgatcgctggtgctcactggggagtcctggcgggcatagcgtatttctccatggtggggaactggcgaaggtcctggtagtgctgctgctatttgccggcgttgacgcgaccacccacgtcaccgggggaagcgtcgcccgcactacgtctggtcttactaatctcctcacaccaggtgccaagcagaacattcagctgatcaacacaacggcagttggcacatcaataggacggccttgaactgcaatgataacctcgacaccggttggatagcagggcttttctattacaacaaattcaactcttcaggctgtccccagaggttggccagcgccgacccctcaccgactttgaccagggctggggccctatcagtcatgccagcgtaaccggctccgaccaacgcccctactgctggcactaccccccaagaccttgcggtattgtgcccgcaaagagcgtgtgtggcccggatattgcttcactcccagccccgttgttgtgggaacgaccgacagggcgggcgtgcccacttataactggggcgcgaatgaaacggacgttttcgtccttaacaacaccaggccaccgtggggcaatggttcggttgcacctggatgaactcaactggattcaccaaagtgtgcggagcgcccccttgtgtcatcgggggggggggcaacaacaccttgtactgccctactgattgtttccgcaagcatccggaagccacatactctcgtgcggctccggtccctggcttacacccaggtgcctggtccactacccgtataggctttggcactatccttgtaccatcaactacaccatatctaaagtcaggatgtatgtgggaggggtcgagcacggctggaagctgcctgcaactggacgcggggtgaacgttgtgatctggaagacagggacaggtctgagctcagcccgttgctgttgtctaccacacagtggcaggtccttccgtgttccttcacgactctgccagccttatcactggcctcatccacctccatcagaacattgtggacgtgcagtacttgtacggggtggggtcaagcatcgcgtcctgggccatcaagtgggagtacgtcgttctcctgttccttctgcttgcagaccgcgcgtctgctcctgcttgtggatgatgttgctcatatcccaagtggaggcggctttggagaaccttataacactcaatgcagcatccctggccgggacgcagggccttgtgtccttcctcgtgttcttctgctttgcatgtacctgaagggtaggtgggtgcccggagcggtctacgccctctacgggatgtggcctctcctcctgctcctgctggcgttgcctcaacgggcatacgcgctggacacggaggtggccgcgtcgtgtgcggcgctgtgcttgtcgggttaatggcgctgactctgtcaccatattacaagcactatatcagctggtgcttatggtggcttcagtattttctgaccagagtagaagcgcaatttcacgtgtgggttccccccctcaacgccgaggggggcgtgacgctgtcatcttactcatgtgtgttgtgcacccgactctggtatttgacatcaccaaacagctgctggccgtcttcggacccctttggattcttcaagccagtctgcttaagtcccctacttcgtgcgcgttcaaggccttctccggatctgcgcgttggcgcggaagatggtcggaggccactacgtgcaaatggccatcatcaagttgggggcgcttactggcacctatgtttataaccatctcactcccctcgggactgggcgcacaacggcctgcgagatctggccgtggctgtagagccagtcgtcttctcccggatggagaccaagctcatcacgtggggggcagacaccgccgcgtgcggtgacatcatcaacgcttgcccgtctccgcccgtaagggccgggagatactgctcgggccagccgacggaatggtctccaagggttggagattgctggcgcccatcacagcgtacgcccagcaaacaaggggcctcctagggtgtataatcaccacctgactggccgggacaaaaaccaagcggagggtgaggtccagattgtgtcaactgctacccaaactttcttggcaacgtgcatcaatggggtatgctggactgtctaccacggggccgggacgaggccatcgcatcacccaagggtcctgtcatccagatgtacaccaatgtagaccaggaccttgtgggctggcccgcccctcaaggtacccgctcattggcaccctgcacctgcggctcctcggacctttacctagtcacgaggccgccgatgtcatccccgtgcgcaggcggggtgatagcaggggcagcttgctttcgccccggcccatctcttacttgaaaggctcctcagggggtccgctgttgtgccccgcgggacacgccgtaggctattcagggccgcggtgtgcacccgtggagtggctaaggcggtggactttatccctgtggagaacctagagacaaccatgaggtccccggtgtttacggacaactcctccccaccagcagtgccccagagcttccaagtggccacctgcatgctcccacaggcagcggcaagagcaccaaggtcccggctgcatacgcagcccagggctacaaggtgctagtgctcaacccttctgttgctgcaacactgggttttggtgcttacatgccaaggctcatggggtcgatcctaacatcaggaccggggtgagaacaattaccactggcagccccatcacgtactccacctacggcaagttccttgccgacggcgggtgctcagggggtgcttatgacataataatttgtgcgagtgccactccacggatgccacatctatcttgggcatcggcactgtccttgatcaagcagagactgcgggggcgagactggttgtgcttgccaccgctacccctccgggctccatcactgtgcccatcctaatatcgaggaggttgctctgtccaccaccggagagatccctttctacggcaaggctatccccctcgaagtgatcaagggggggagacatctcatcttctgccactcaaagaggaagtgcgacgagctcgccgcaagttggtcgcattgggcatcaatgccgtggcttactaccgcggtcttgacgtgtctgtcatcccgaccagcggcgatgttgtcgtcgtggcaactgatgctctcatgaccggctataccggcgacttcactcggtgatagactgcaacacgtgtgtcacccagacagtcgatttcagccttgaccctactttcaccattgagacaaccacgcttccccaggatgccgtctcccgcactcaacgtcggggcaggactggcagggggaagtaggcatctacagatttgtggcaccgggggagcgcccctccggtatgttcgactcgtccgtcctctgtgagtgctatgacgcgggctgtgcttggtatgagctcacgcccgccgagactacagttaggtacgagcgtacatgaacaccccggggcttcccgtgtgccaggaccatcttgagttttgggagggcgtctttacgggcctcacccatatagatgctcacttcctatctcagacaaagcagagtggggaaaactttccttaccggtagcgtaccaagccaccgtgtgcgctagggctcaagcccctcccccatcgtgggaccagatgtggaagtgtttgatccgcctcaagcccaccctcaatgggccaacacccctgctatacagactggcgctgttcagaatgaagtcaccctgacgcacccaatcaccaaatacatcatgacatgtatgtcggctgac

SEQ ID NO: 671 - DNA, 4881 bp, Hepatitis C virus
aacaccaaccgtcgcccacaggacgtcaagttcccgggtggcggtcagatcgttggtggagtttacttgttgccgcgcaggggccccagattgggtgtgcgcgcgacgaggaagacttccgagcggtgcaacctcgaggtagacgtcagcctatccccaaggcgcgtcggcccgagggcaggacctgggctcagcccgggtatccttggcccctctatggtaatgagggctgcgggtgggcgggatggctcctgctccccgtggctctcggcctagctggggccccacagacccccggcgtaggtcgcgcaatttgggtaaggtcatcgatacccttacgtgcggcttcgccgacctcatggggtacataccgctcgtcggcgcccctcttggagcgctgccagggccctggcgcatggcgtccgggttctggaagacggcgtgaactatgcaacagggaaccttcctggttgctctttctctatcttccttctggccctgctctcttgcctgactgtgccccttcggcctaccaagtgcgcaactccacggggctctaccatgtcaccaatgattgccctaactcgagtattgtgtacgaggcggctgatgccatcctgcacattccggggtgtgtcccttgcgtccgcgagggtaacgcctgaggtgttgggtgccgataacccccacggtggccaccagggacggcaaactccccacgacgcagctacgacgtcacatcgatctgcttgtcgggagcgccaccctttgctcggccctctacgtggggacctgtgcgggtctgtctttcttgtcggtcagctgttcaccttctctccgaggctccactggacgacgcagggctgcaattgttccatctatcccggccatataacgggtcaccgcatggcatgggatatgatgatgaactgtcccctacgacggcattggtagtagctcagctgctccggatcccacaagccatcttggacatgatcgctggtgctcactggggagtcctggcgggcatagcgtatttctccatggtggggaactggcgaaggtcctggtagtgctgctgctatttgccggcgttgacgcgaccacccacgtcaccgggggaagcgtcgcccgcactacgtctggtcttactaatctcctcacaccaggtgccaagcagaacattcagctgatcaacacaacggcagttggcacatcaataggacggccttgaactgcaatgataacctcgacaccggctggatagcagggcttttctattacaacaaattcaactcttcaggctgtccccagaggttagccagcgccgacccctcaccgactttgaccagggctggggccctatcagtcatgccagcgtaaccggctccgaccaacgcccctactgctggcactaccccccaagaccttgcggtattgtgcccgcaaagagcgtgtgtggcccggatattgcttcactcccagccccgttgttgtgggaacgaccgacagggcgggcgtgcccacctacaactggggcgcgaatgaaacggacgttttcgtccttaacaacaccaggccaccgcggggcaatggttcggttgcacctggatgaactcaactggattcaccaaagtgtgcggagcgcccccttgtgtcatcgggggggggggcaacaacaccttgtactgccctactgattgtttccgcaagcatccggaagccacatactctcgtgcggctccggtccctggcttacacccaggtgcctggtccactacccgtataggctttggcactatccttgtaccatcaactacaccatatctaaagtcaggatgtatgtgggaggggtcgagcacggctggaagctgcctgcaactggacgcggggtgaacgttgtgatctggaagacagggacaggtctgagctcagcccgttgctgttgtctaccacacagtggcaggtccttccgtgttccttcacgactctgccagccttatcactggcctcatccacctccatcagaacattgtggacgtgcagtacttgtacggggtggggtcaagcatcgcgtcctgggccatcaagtgggagtacgtcgttctcctgttccttctgcttgcagaccgcgcgtctgctcctgcttgtggatgatgttactcatatcccaagtggaggcggctttggagaacctcataacactcaatgcagcatccctggccgggacgcacggccttgtgtccttcctcgtgttcttctgctttgcatgtacctgaagggtaggtgggtgcccggagcggtctacgccctctacgggatgtggcctctcctcctgctcctgctggcgttgcctcaacgggcatacgcgctggacacggaggtggccgcgtcgtgtgcggcgctgtgcttgtcgggttaatggcgctgactctgtcaccatattacaagcactatatcagctggtgcttatggtggcttcagtattttctgaccagagtagaagcgcaatttcacgtgtgggttccccccctcaacgccgaggggggcgtgacgctgtcatcttactcatgtgtgttgtgcacccgactctggtatttggcatcgccaaacagctgctggccgtcttcggacccctttggattcttcaagccagtctgcttaagtcccctacttcgtgcgcgttcaaggccttctccggatctgcgcgttagcgcggaagatggtcggaggccactacgtgcaaatggccatcatcaagttgggggcgcttactggcacctatgtttataaccatctcactcccctcgggactgggcgcacaacggcctgcgagatctggccgtggctgtagagccagtcgtcttctcccggatggagaccaagctcatcacgtggggggcagacaccgccgcgtgcggtgacatcatcaacgcttgcccgtctccgcccgtaagggccgggagatactgctcgggccagccgacggaatggtctccaagggttggagattgctggcgcccgtcacagcgtacgcccagcaaacaaggggcctcctagggtgtataatcaccacctgactggccgggacaaaaaccaagcggagggtgaggtccagattgtgtcaactgctacccaaactttcttggcaacgtgcatcaatgggatatgctggactgtctaccacggggccgggacgaggccatcgcatcacccaagggtcctgtcatccagatgtacaccaatgtagaccaggaccttgtgggctggcccgcccctcaaggtacccgctcattgacaccctgcacctgcggctcctcggacctttacctggtcacgaggccgccgatgtcatccccgtgcgcaggcggggtgatagcaggggcagcttgctttcgccccggcccatctcttacttgaaaggctcctcagggggtccgctgttgtgccccgcgggacacgccgtaggctattcagggccgcggtgtgcacccgtggggtggctaaggcggtggactttatccctgtggagaacctagagacaaccatgaggtccccggtgtttacggacaactcctccccaccagcagtgccccagagcttccaagtggccacctgcatgctcccacaggcagcggcaagagcaccaaggtcccggctgcatacgcagcccagggctacaaggtgctagtgctcaacccttctgttgctgcaacactgggctttggtgcttacatgccaaggctcatggggtcgatcctaacatcaggaccggggtgagaacaattaccactggcagccccatcacgtactccacctacggcaagttccttgccgacggcgggtgctcagggggtgcttatgacataataatttgtgcgagtgccactccacggatgccacatctatcttgggcatcggcactgtccttgatcaagcagagactgcgggggcgagactggttgtgcttgccaccgctacccctccgggctccatcactgtgcccatcctaatatcgaggaggttgctctgtccaccaccggagagatccctttctacggcaaggctatccccctcgaagtgatcaagggggggagacatctcatcttctgccactcaaagaggaagtgcgacgagctcgccgcaagttggtcgcattgggcatcaatgccgtggcttactaccgcggtcttgacgtgtctgtcatcccgaccagcggcgatgttgtcgtcgtggcaactgatgctctcatgaccggctataccggcgacttcactcggtgatagactgcaacacgtgtgtcacccagacagtcgatttcagccttgaccctaccttcaccattgagacaaccacgcttccccaggatgccgtctcccgcactcaacgtcggggcaggactggcagggggaagtaggcatctacagatttgtggcaccgggggagcgcccctccggtatgttcgactcgtccgtcctctgtgagtgctatgacgcgggctgtgcttggtatgagctcacgcccgccgagactacagttaggtacgagcgtacatgaacaccccggggcttcccgtgtgccaggaccatcttgagttttgggagggcgtctttacgggcctcacccatatagatgcccacttcctatctcagacaaagcagagtggggaaaactttccttaccggtagcgtaccaagccaccgtgtgcgctagggctcaagcccctcccccatcgtgggaccagatgtggaagtgtttgatccgcctcaaacccaccctcaatgggccaacacccctgctatacagactggcgctgttcagaatgaagtcaccctgacgcacccaatcaccaaatacatcatgacatgtatgtcggctgac

SEQ ID NO: 672 - DNA, 4881 bp, Hepatitis C virus
aacaccaaccgtcgcccacaggacgtcaagttcccgggtggcggtcagatcgttggtggagtttacttgttgccgcgcaggggccccagattgggtgtgcgcgcgacgaggaagacttccgagcggtgcaacctcgaggtagacgtcagcctatccccaaggcgcgtcggcccgagggcaggacctgggctcagcccgggtatccttggcccctctatggtaatgagggctgcgggtgggcgggatggctcctgctccccgcggctctcggcctagctggggccccacagacccccggcgtaggtcgcgcaatttgggtaaggtcatcgatacccttacgtgcggcttcgccgacctcatggggtacataccgctcgtcggcgcccctcttggagcgctgccagggccctggcgcatggcgtccgggttctggaagacggcgtgaactatgcaacagggaaccttcctggttgctctttctctatcttccttctggccctgctctcttgcctgactgtgccccttcggcctaccaagtgcgcaactccacggggctctaccatgtcaccaatgattgccctaactcgagtattgtgtacgaggcggctgatgccatcctgcacattccggggtgtgtcccttgcgtccgcgagggtaacgcctgaggtgttgggtgccgataacccccacggtggccaccagggacggcaaactccccacgacgcagctacgacgtcacatcgatctgcttgtcgggagcgccaccctttgctcggccctctacgtggggacctgtgcgggtctgtctttcttgtcggtcagctgttcaccttctctccgaggctccactggacgacgcagggctgcaattgttccatctatcccggccatataacgggtcaccgcatggcatgggatatgatgatgaactgtcccctacgacggcattggtagtagctcagctgctccggatcccacaagccatcttggacatgatcgctggtgctcactggggagtcctggcgggcatagcgtatttctccatggtggggaactggcgaaggtcctggtagtgctgctgctatttgccggcgttgacgcgaccacccacgtcaccgggggaagcgtcgcccgcactacgtctggtcttgctaatctcctcacaccaggtgccaagcagaacattcagctgatcaacacaacggcagttggcacatcaataggacggccttgaactgcaatgataacctcgacaccggctggatagcagggcttttctattacaacaaattcaactcttcaggctgtccccagaggttggccagcgccgacccctcaccgactttgaccagggctggggccctatcagtcatgccagcgtaaccggctccgaccaacgcccctactgctggcactaccccccaagaccttgcggtattgtgcccgcaaagagcgtgtgtggcccggatattgcttcactcccagccccgttgttgtgggaacgaccgacagggcgggcgtgcccacctacaactggggcgcgaatgaaacggacgttttcgtccttaacaataccaggccaccgcggggcaatggttcggttgcacctggatgaactcaactggattcaccaaagtgtgcggagcgcccccttgtgtcatcgggggggggggcaacaacaccttgtactgccctactgattgtttccgcaagcatccggaagccacatactctcgtgcggctccggtccctggcttacacccaggtgcctggtccactacccgtataggctttggcactatccttgtaccatcaactacaccatatctaaagtcaggatgtatgtgggaggggtcgagcacggctggaagctgcctgcaactggacgcggggtgaacgttgtgatctggaagacagggacaggtctgagctcagcccgttgctgttgtctaccacacagtggcaggtccttccgtgttccttcacgactctgccagccttatcactggcctcatccacctccatcagaacattgtggacgtgcagtacttgtacggggtggggtcaagcatcgcgtcctgggccatcaagtgggagtacgtcgttctcctgttccttctgcttgcagaccgcgcgtctgctcctgcttgtggatgatgttactcatatcccaagtggaggcggctttggagaacctcataacactcaatgcagcatccctggccgggacgcacggccttgtgtccttcctcgtgttcttctgctttgcatgtacctgaagggtaggtgggtgcccggagcggtctacgccctctacgggatgtggcctctcctcctgctcctgctggcgttgcctcaacgggcatacgcgctggacacggaggtggccgcgtcgtgtgcggcgctgtgcttgtcgggttaatggcgctgactctgtcaccatattacaagcactatatcagctggtgcttatggtggcttcagtattttctgaccagagtagaagcgcaatttcacgtgtgggttccccccctcaacgccgaggggggcgtgacgctgtcatcttactcatgtgtgttgtgcacccgactctggtatttgacatcaccaaacagctgctggccgtcttcggacccctttggattcttcaagccagtctgcttaagtcccctacttcgtgcgcgttcaaggccttctccggatctgcgcgttagcgcggaagatggtcggaggccactacgtgcaaatggccatcatcaagttgggggcgcttactggcacctatgtttataaccatctcactcccctcgggactgggcgcacaacggcctgcgagatctggccgtggctgtagagccagtcgtcttctcccggatggagaccaagctcatcacgtggggggcagacaccgccgcgtgcggtgacatcatcaacgcttgcccgtctccgcccgtaagggccgggagatactgctcgggccagccgacggaatggtctccaagggttggagattgctggcgcccatcacagcgtacgcccagcaaacaaggggcctcctagggtgtataatcaccacctgactggccgggacaaaaaccaagcggagggtgaggtccagattgtgtcaactgctacccaaactttcttggcaacgtgcatcaatggggtatgctggactgtctaccacggggccgggacgaggccatcgcatcacccaagggtcctgtcatccagatgtacaccaatgtagaccaggaccttgtgggctggcccgcccctcaaggtacccgctcattggcaccctgcacctgcggctcctcggacctttacctggtcacgaggccgccgatgtcatccccgtgcgcaggcggggtgatagcaggggcagcttgctttcgccccggcccatctcttacttgaaaggctcctcagggggtccgctgttgtgccccgcgggacacgccgtaggctattcagggccgcggtgtgcacccgtggagtggctaaggcggtggactttatccctgtggagaacctagagacaaccatgaggtccccggtgtttacggacaactcttccccaccagcagtgccccagagcttccaagtggccacctgcatgctcccacaggcagcggcaagagcaccaaggtcccggctgcatacgcagcccagggctacaaggtgctagtgctcaacccttctgttgctgcaacactgggctttggtgcttacatgccaaggctcatggggtcgaccctaacatcaggaccggggtgagaacaattaccactggcagcccaatcacgtactccacctacggcaagttccttgccgacggcgggtgctcagggggtgcttatgacataataatttgtgcgagtgccactccacggatgccacatctatcttgggcatcggcactgtccttgatcaagcagagactgcgggggcgagactggttgtgcttgccaccgctacccctccgggctccatcactgtgcccatcctaatatcgaggaggttgctctgtccaccaccggagagatccctttctacggcaaggctatccccctcgaagtgatcaagggggggagacatctcatcttctgccactcaaagaggaagtgcgacgagctcgccgcaagttggtcgcattgggcatcaatgccgtggcttactaccgcggtcttgacgtgtctgtcatcccgaccggcggcgatgttgtcgtcgtggcaactgatgctctcatgaccggctataccggcgacttcactcggtgatagactgcaacacgtgtgtcacccagacagtcgatttcagccttgaccctaccttcaccattgagacaaccacgcttccccaggatgccgtctcccgcactcaacgtcggggcaggactggcagggggaagtaggcatctacaggtttgtggcaccgggggagcgcccctccggtatgttcgactcgtccgtcctctgtgagtgctatgacgcgggctgtgcttggtatgagctcacgcccgccgagactacagttaggtacgagcgtacatgaacaccccggggcttcccgtgtgccaggaccatcttgagttttgggagggcgtctttacgggcctcacccatatagatgcccacttcctatctcagacaaagcagagtggggaaaactttccttaccggtagcgtaccaagccaccgtgtgcgctagggctcaagcccctcccccatcgtgggaccagatgtggaagtgtttgatccgcctcaagcccaccctcaatgggccaacacccctgctatacagactggcgctgttcagaatgaagtcaccctgacgcacccaatcaccaaatacatcatgacatgtatgtcggctgac

SEQ ID NO: 673 - DNA, 4881 bp, Hepatitis C virus
aacaccaaccgtcgcccacaggacgtcaagttcccgggtggcggtcagatcgttggtggagtttacttgttgccgcgcaggggccccagattgggtgtgcgcgcgacgaggaagacttccgagcggtgcaacctcgaggtagacgtcagcctatccccaaggcgcgtcggcccgagggcaggacctgggctcagcccgggtatccttggcccctctatggtaatgagggctgcgggtgggcgggatggctcctgctccccgtggctctcggcctagctggggccccacagacccccggcgtaggtcgcgcaatttgggtaaggtcatcgatacccttacgtgcggcttcgccgacctcatggggtacataccgctcgtcggcgcccctcttggagcgctgccagggccctggcgcatggcgtccgggttctggaagacggcgtgaactatgcaacagggaaccttcctggttgctctttctctatcttccttctagccctgctctcttgcctgactgtgccccttcggcctaccaagtgcgcaactccacggggctctaccatgtcaccaatgattgccctaactcgagtattgtgtacgaggcggctgatgccatcctgcacattccggggtgtgtcccttgcgtccgcgagggtaacgcctgaggtgttgggtgccgataacccccacggtggccaccagggacggcaaactccccacgacgcagctacgacgtcacatcgatctgcttgtcgggagcgccaccctttgctcggccctctacgtggggacctgtgcgggtctgtctttcttgtcggtcagctgttcaccttctctccgaggctccactggacgacgcagggctgcaattgttccatctatcccggccatataacgggtcaccgcatggcatgggatatgatgatgaactgtcccctacgacggcattggtagtagctcagctgctccggatcccacaagccatcttggacatgatcgctggtgctcactggggagtcctggcgggcatagcgtatttctccatggtggggaactggcgaaggtcctggtagtgctgctgctatttgccggcgttgacgcgaccacccacgtcaccgggggaagcgtcgcccgcactacgtctggtcttactaatctcctcacaccaggtgccaagcagaacattcagctgatcaacacaacggcagttggcacatcaataggacggccttgaactgcaatgataacctcgacaccggctggatagcagggcttttctattacaacaaattcaactcttcaggctgtccccagaggttggccagcgccgacccctcaccgactttgaccagggctggggccctatcagtcatgccagcgtaaccggctccgaccaacgcccctactgctggcactaccccccaagaccttgcggtattgtgcccgcaaagagcgtgtgtggcccggatattgcttcactcccagccccgtcgttgtgggaacgaccgacagggcgggcgtgcccacctacaactggggcgcgaatgaaacggacgttttcgtccttaataacaccaggccaccgcggggcaatggttcggttgcacctggatgaactcaactggattcaccaaagtgtgcggagcgcccccttgtgtcatcgggggggggggcaacaacaccttgtactgccctactgattgtttccgcaagcatccggaagccacatactctcgtgcggctccggtccctggcttacacccaggtgcctggtccactacccgtataggctttggcactatccttgtaccatcaactacaccatatctaaagtcaggatgtatgtgggaggggtcgagcacggctggaagctgcctgcaactggacgcggggtgaacgttgtgatctggaagacagggacaggtctgagctcagcccgttgctgttgtctaccacacagtggcaggtccttccgtgttccttcacgactctgccagccttatcactggcctcatccacctccatcagaacattgtggacgtgcagtacttgtacggggtggggtcaagcatcgcgtcctgggccatcaagtgggagtacgtcgttctcctgttccttctgcttgcagaccgcgcgtctgctcctgcttgtggatgatgttactcatatcccaagtggaggcggctttggagaacctcataacactcaatgcagcatccctggccgggacgcacggccttgtgtccttcctcgtgttcttctgctttgcatgtacctgaagggtaggtgggtgcccggagcggtctacgccctctacgggatgtggcctctcctcctgctcctgctggcgttgcctcaacgggcatacgcgctggacacggaggtggccgcgtcgtgtgcggcgctgtgcttgtcgggttaatggcgctgactctgtcaccatattacaagcactatatcagctggtgcttatggtggcttcagtattttctgaccagagtagaagcgcaatttcacgtgtgggttccccccctcaacgccgaggggggcgtgacgctgtcatcttactcatgtgtgttgtgcacccgactctggtatttgacatcaccaaacagctgctggccgtcttcggacccctttggattcttcaagccagtctgcttaagtcccctacttcgtgcgcgttcaaggccttctccggatctgcgcgttagcgcggaagatggtcggaggccactacgtgcaaatggccatcatcaagttgggggcgcttactggcacctatgtttataaccatctcactcccctcgggactgggcgcacaacggcctgcgagatctggccgtggctgtagagccagtcgtcttctcccggatggagaccaagctcatcacgtggggggcagacaccgccgcgtgcggtgacatcatcaacgcttgcccgtctccgcccgtaagggccgggagatactgctcgggccagccgacggaatggtctccaagggttggagattgctggcgcccatcacagcgtacgcccagcaaacaaggggcctcctagggtgtataatcaccacctgactggccgggacaaaaaccaagcggagggtgaggtccagattgtgtcaactgctacccaatctttcttggcaacgtgcatcaatggggtatgctggactgtctaccacggggccgggacgaggccatcgcatcacccaagggtcctgtcatccagatgtacaccaatgtagaccaggaccttgtgggctggcccgcccctcaaggtacccgctcactggcaccctgcacctgcggctcctcggacctttacctggtcacgaggccgccgatgtcatccccgtgcgcaggcggggtgatagcaggggcagcttgctttcgccccggcccatctcttacttgaaaggctcctcagggggtccgctgttgtgccccgcgggacacgccgtaggctattcagggccgcggtgtgcacccgtggagtggctaaggcggtggactttatccctgtggagaacctagagacaaccatgaggtccccggtgtttacggacaactcctccccaccagcagtgccccagagcttccaagtggccacctgcatgctcccacaggcagcggcaagagcaccaaggtcccggccgcatacgcagcccagggctacaaggtgctagtgctcaacccttctgttgctgcaacactgggctttggtgcttacatgccaaggctcatggggtcgatcctaacatcaggaccggggtgagaacaattaccactggcagccccatcacgtactccacctacggcaagttccttgccgacggcgggtgctcagggggtgcttatgacataataatttgtgcgagtgccactccacggatgccacatctatcttgggcatcggcactgtccttgatcaagcagagactgcgggggcgagactggttgtgcttgccaccgctacccctccgggctccatcactgtgcccatcctaatatcgaggaggttgctctgtccaccaccggagagatccctttctacggcaaggctatccccctcgaagtgatcaagggggggagacatctcatcttctgccactcaaagaggaagtgcgacgagctcgccgctagttggtcgcattgggcatcaatgccgtggcttactaccgcggtcttgacgtgtctgtcatcccgaccagcggcgatgttgtcgtcgtggcaactgatgctctcatgaccggctataccggcgacttcactcggtgatagactgcaacacgtgtgtcacccagacagtcgatttcagccttgaccctaccttcaccattgagacaaccacgcttccccaggatgccgtctcccgcactcaacgtcggggcaggactggcagggggaagtaggcatctacagatttgtggcaccgggggagcgcccctccggtatgttcgactcgtccgtcctctgtgagtgctatgacgcgggctgtgcttggtatgagctcacgcccgccgagactacagttaggtacgagcgtacatgaacaccccggggcttcccgtgtgccaggaccatcttgagttttgggagggcgtctttacgggcctcacccatatagatgcccacttcctatctcagacaaagcagagtggggaaaactttccttaccggtagcgtaccaagccaccgtgtgcgctagggctcaagcccctcccccatcgtgggaccagatgtggaagtgtttgatccgcctcaagcccaccctcaatgggccaacacccctgctatacagactggcgctgttcagaatgaagtcaccctgacgcacccaatcaccaaatacatcatgacatgtatgtcggctgac

SEQ ID NO: 674 - DNA, 4881 bp, Hepatitis C virus
aacaccaaccgtcgcccacaggacgtcaagttcccgggtggcggtcagatcgttggtggagtttacttgttgccgcgcaggggccccagattgggtgtgcgcgcgacgaggaagacttccgagcggtgcaacctcgaggtagacgtcagcctatccccaaggcgcgtcggcccgagggcaggacctgggctcagcccgggtatccttggcccctctatggtaatgagggctgcgggtgggcgggatggctcctgctccccgtggctctcggcctagctggggccccacagacccccggcgtaggtcgcgcaatttgggtaaggtcatcgatacccttacgtgcggcttcgccgacctcatggggtacataccgctcgtcggcgcccctcttggagcgctgccagggccctggcgcatggcgtccgggttctggaagacggcgtgaactatgcaacagggaaccttcctggttgctctttctctatcttccttctggccctgctctcttgcctgactgtgccccttcggcctaccaagtgcgcaactccacggggctctaccatgtcaccaatgattgccctaactcgagtattgtgtacgaggcggctgatgccatcctgcacattccggggtgtgtcccttgcgtccgcgagggtaacgcctgaggtgttgggtgccgataacccccacggtggccaccagggacggcaaactccccacgacgcagctacgacgtcacatcgatctgcttgtcgggagcgccaccctttgttcggccctttacgtggggacctgtgcgggtctgtctttcttgtcggtcagctgttcaccttctctccgaggctccactggacgacgcagggctgcaattgttccatctatcccggccatataacgggtcaccgcatggcatgggatatgatgatgaactgtcccctacgacggcattggtagtagctcagctgctccggatcccacaagccatcttggacatgatcgctggtgctcactggggagtcctggcgggcatagcgtatttctccatggtggggaactggcgaaggtcctggtagtgctgctgctatttgccggcgttgacgcgaccacccacgtcaccgggggaagcgtcgcccgcactacgtctggtcttactaatctcctcacaccaggtgccaagcagaacattcagctgatcaacacaacggcagttggcacatcaataggacggccttgaactgcaatgataacctcgacaccggttggatagcagggcttttctattacaacaaattcaactcttcaggctgtccccagaggttggccagcgccgacccctcaccgactttgaccagggctggggccctatcagtcatgccagcgtaaccggctccgaccaacgcccctactgctggcactaccccccaagaccttgcggtattgtgcccgcaaagagcgtgtgtggcccggatattgcttcactcccagccccgttgttgtgggaacgaccgacagggcgggcgtgcccacttacaactggggcgcgaatgaaacggacgttttcgtccttaacaacaccaggccaccgcggggcaatggttcggttgcacctggatgaactcaactggattcaccaaagtgtgcggagcgcccccttgtgtcatcgggggggggggcaacaacaccttgtactgccctactgattgtttccgcaagcatccggaagccacatactctcgtgcggctccggtccctggcttacacccaggtgcctggtccactacccgtataggctttggcactatccttgtaccatcaactacaccatatctaaagtcaggatgtatgtgggaggggtcgagcacggctggaagctgcctgcaactggacgcggggtgaacgttgtgatctggaagacagggacaggtctgagctcagcccgttgctgttgtctaccacacagtggcaggtccttccgtgttccttcacgactctgccagccttatcactggcctcatccacctccatcagaacattgtggacgtgcagtacttgtacggggtggggtcaagcgttgcgtcctgggccatcaagtgggagtacgtcgttctcctgttccttctgcttgcagaccgcgcgtctgctcctgcttgtggatgatgttactcatatcccaagtggaggcggctttggagaaccttataacactcaatgcagcatccctggccgggacgcagggccttgtgtccttcctcgtgttcttctgctttgcatgtacctgaagggtaggtgggtgcccggagcggtctacgccctctacgggatgtggcctctcctcctgctcctgctggcgttgcctcaacgggcatacgcgctggacacggaggtggccgcgtcgtgtgcggcgctgtgcttgtcgggttaatggcgctgactctgtcaccatattacaagcactatatcagctggtgcttatggtggcttcagtattttctgaccagagtagaagcgcaatttcacgtgtgggttccccccctcaacgccgaggggggcgtgacgctgtcatcttactcatgtgtgttgtgcacccgactctggtatttgacatcaccaaacagctgctggccgtcttcggacccctttggattcttcaagccagtctgcttaagtcccctacttcgtgcgcgttcaaggccttctccggatctgcgcgttagcgcggaagatggtcggaggccactacgtgcaaatggccatcatcaagttgggggcgcttactggcacctatgtttataaccatctcactcccctcgggactgggcgcacaacggcctgcgagacctggccgtggctgtagagccagtcgtcttctcccggatggagaccaagctcatcacgtggggggcagacaccgccgcgtgcggtgacatcatcaacgcttgcccgtctccgcccgtaagggccgggagatactgctcgggccagccgacggaatggtctccaagggttggagattgctggcgcccatcacagcgtacgcccagcaaacaaggggcctcctagggtgcataatcaccacctgactggccgggacaaaaaccaagcggagggtgaggtccagattgtgtcaactgctacccaaactttcttggcaacgtgcatcaatggggtatgctggactgtctaccacggggccgggacgaggccatcgcatcacccaagggtcctgtcatccagatgtacaccaatgtagaccaggaccttgtgggctggcccgcccctcaaggtacccgctcattggcaccctgcacctgcggctcctcggacctttacctggtcacgaggccgccgatgtcatccccgtgcgcaggcggggtgatagcaggggcagcttgctttcgccccggcccatctcttacttgaaaggctcctcagggggtccgctgttgtgccccgcgggacacgccgtaggctattcagggccgcggtgtgcacccgtggagtggctaaggcggtggactttatccctgtggagaacctagagacaaccatgaggtccccggtgtttacggacaactcctccccaccagcagtgccccagagcttccaagtggccacctgcatgctcccacaggcagcggcaagagcaccaaggtcccggctgcatacgcagcccagggctacaaggtgctagtgctcaacccttctgttgctgcaacactgggctttggtgcttacatgccaaggctcatggggtcgatcctaacatcaggaccggggtgagaacaattaccactggcagccccatcacgtactccacctacggcaagttccttgccgacggcgggtgctcagggggtgcttatgacataataatttgtgcgagtgccactccacggatgccacatctatcttgggcatcggcactgtccttgatcaagcagagactgcgggggcgagactggttgtgcttgccaccgctacccctccgggctccatcactgtgcccatcctaatatcgaggaggttgctctgtccaccaccggagagatccctttctacggcaaggctatccccctcgaagtgatcaagggggggagacatctcatcttctgccactcaaagaggaagtgcgacgagttcgccgcaagttggtcgcattgggcatcaatgccgtggcttactaccgcggtcttgacgtgtctgtcatcccgaccagcggcgatgttgtcgtcgtggcaactgatgctctcatgaccggctataccggcgacttcactcggtgatagactgcaacacgtgtgtcacccagacagtcgatttcagccttgaccctaccttcaccattgagacaaccacgcttccccaggatgccgtctcccgcactcaacgtcggggcaggactggcagggggaagtaggcatctacagatttgtggcaccgggggagcgcccctccggtatgttcgactcgtccgtcctctgtgagtgctatgacgcgggctgtgcttggtatgagctcatgcccgccgagactacagttaggtacgagcgtacatgaacaccccggggcttcccgtgtgccaggaccatcttgagttttgggagggcgtctttacgggcctcacccatatagatgcccacttcctatctcagacaaagcagagtggggaaaactttccttaccggtagcgtaccaagccaccgtgtgcgctagggcccaagcccctcccccatcgtgggaccagatgtggaagtgtttgatccgcctcaagcccaccctcaatgggccaacacccctgctatacagactggcgctgttcagaatgaagtcaccctgacgcacccaatcaccaaatacatcatgacatgtatgtcggctgac

SEQ ID NO: 675 - DNA, 4881 bp, Hepatitis C virus
aacaccaaccgtcgcccacaggacgtcaagttcccgggtggcggtcagatcgttggtggagtttacttgttgccgcgcaggggccccagattgggtgtgcgcgcgacgaggaagacttccgagcggtgcaacctcgaggtagacgtcagcctatccccaaggcgcgtcggcccgagggcaggacctgggctcagcccgggtatccttggcccctctatggtaatgagggctgcgggtgggcgggatggctcctgctccccgtggctctcggcctagctggggccccacagacccccggcgtaggtcgcgcaatttgggtaaggtcatcgatacccttacgtgcggcttcgccgacctcatggggtacataccgctcgtcggcgcccctcttggagcgctgccagggccctggcgcatggcgtccgggttctggaagacggcgtgaactatgcaacagggaaccttcctggttgctctttctctatcttccttctggccctgctctcttgcctgactgtgccccttcggcctaccaagtgcgcaactccacggggctctaccatgtcaccaatgattgccctaactcgagtattgtgtacgaggcggctgatgccatcctgcacattccggggtgtgtcccttgcgtccgcgagggtaacgcctgaggtgttgggtgccgataacccccacggtggccaccagggacggcaaactccccacgacgcagctacgacgtcacatcgatctgcttgtcgggagcgccaccctttgttcggccctctacgtggggacctgtgcgggtctgtctttcttgtcggtcagctgttcaccttctctccgaggctccactggacgacgcagggctgcaattgttccatctatcccggccatataacgggtcaccgcatggcatgggatatgatgatgaactgtcccctacgacggcattggtagtagctcagctgctccggatcccacaagccatcttggacatgatcgctggtgctcactggggagtcctggcgggcatagcgtatttctccatggtggggaactggcgaaggtcctggtagtgctgctgctatttgccggcgttgacgcgaccacccacgtcaccgggggaagcgtcgcccgcactacgtctggtcttgctaatctcctcacaccaggtgccaagcagaacattcagctgatcaacacaacggcagttggcacatcaataggacggccttgaactgcaatgataacctcgacaccggctggatagcagggcttttctattacaacaaattcaactcttcaggctgtccccagaggttggccagcgccgacccctcaccgactttgaccagggctggggccctatcagtcatgccagcgtaaccggctccgaccaacgcccctactgctggcactaccccccaagaccttgcggtattgtgcccgcaaagagcgtgtgtggcccggatattgcttcactcccagccccgttgttgtgggaacgaccgacagggcgggcgtgcccacctacaactggggcgcgaatgaaacggacgttttcgtccttaacaacaccaggccaccgcggggcaatggttcggttgcacctggatgaactcaactggattcaccaaagtgtgcggagcgcccccttgtgtcatcgggggggggggcaacaacaccttgtactgccctactgattgtttccgcaagcatccggaagccacatactctcgtgcggctccggtccctggcttacacccaggtgcctggtccactacccgtataggctttggcactatccttgtaccatcaactacaccatatctaaagtcaggatgtatgtgggaggggtcgagcacggctggaagctgcctgcaactggacgcggggtgaacgttgtgatctggaagacagggacaggtctgagctcagcccgttgctgttgtctaccacacagtggcaggtccttccgtgttccttcacgactctgccagccttatcactggcctcatccacctccatcagaacattgtggacgtgcagtacttgtacggggtggggtcaagcatcgcgtcctgggccatcaagtgggagtacgtcgttctcctgttccttctgcttgcaggccgcgcgtctgctcctgcttgtggatgatgttactcatatcccaagtggaggcggctttggagaacctcataacactcaatgcagcatccctggccgggacgcacggccttgtgtccttcctcgtgttcttctgctttgcatgtacctgaagggtaggtgggtgcccggagcggtctacgccctctacgggatgtggcctctcctcctgctcctgctggcgttgcctcaacgggcatacgcgctggacacggaggtggccgcgtcgtgtgcggcgctgtgcttgtcgggttaatggcgctgactctgtcaccatattacaagcactatatcagctggtgcttatggtggcttcagtattttctgaccagagtagaagcgcaatttcacgtgtgggttccccccctcaacgccgaggggggcgtgacgctgtcatcttactcatgtgtgttgtgcacccgactctggtatttgacatcaccaaacagctgctggccgtcttcggacccctttggattcttcaagccagtctgcttaagtcccctacttcgtgcgcgttcaaggccttctccggatctgcgcgttagcgcggaagatggtcggaggccactacgtgcaaatggccatcatcaagttgggggcgcttactggcacctatgtttataaccatctcactcccctcgggactgggcgcacaacggcctgcgagatctggccgtggctgtagagccagtcatcttctcccggatggagaccaagctcatcacgtggggggcagacaccgccgcgtgcggtgacatcatcaacgcttgcccgtctccgcccgtaagggccgggagatactgctcgggccagccgacggaatggtctccaagggttggagattgctggcgcccatcacagcgtacgcccagcaaacaaggggcctcctagggtgtataatcaccacctgactggccgggacaaaaaccaagcggagggtgaggtccagattgtgtcaactgctacccaaactttcttggcaacgtgcatcaatggggtatgctggactgtctaccacggggccgggacgaggccatcgcatcacccaagggtcctgtcatccagatgtacaccaatgtagaccaggaccttgtgggctggcccgcccctcaaggtacccgctcattggcaccctgcacctgcggctcctcggacctttacctggtcacgaggccgccgatgtcatccccgtgcgcaggcggggtgatagcaggggcagcttgctttcgccccggcccatctcttacttgaaaggctcctcagggggtccgctgttgtgccccgcgggacacgccgtaggctattcagggccgcggtgtgcacccgtggagtggctaaggcggtggactttatccctgtggagaacctagagacaaccatgaggtccccggtgtttacggacaactcctccccaccagcagtgccccagagcttccaagtggccacctgcatgctcccacaggcagcggcaagagcaccaaggtcccggctgcatacgcagcccagggctacaaggtgctagtgctcaacccttctgttgctgcaacactgggctttggtgcttacatgccaaggctcatggggtcgatcctaacatcaggaccggggtgagaacaattaccactggcagccccatcacgtactccacctacggcaagttccttgccgacggcgggtgctcagggggtgcttatgacataataatttgtgcgagtgccactccacggatgccacatctatcttgggcatcggcactgtccttgatcaagcagagactgcgggggcgagactggttgtgcttgccaccgctacccctccgggctccatcactgtgcccatcctaatatcgaggaggttgctctgtccaccaccggagagatccctttctacggcaaggctatccccctcgaagtgatcaagggggggagacatctcatcttctgccactcaaagaggaagtgcgacgagctcgccgcaagttggtcgcattgggcatcaatgccgtggcttactaccgcggtcttgacgtgtctgtcatcccgaccagcggcgatgttgtcgtcgtggcaactgatgctctcatgaccggctataccggcgacttcactcggtgatagactgcaacacgtgtgtcacccagacagtcgatttcagccttgaccctaccttcaccattgagacaaccacgcttccccaggatgccgtctcccgcactcaacgtcggggcaggactggcagggggaagtaggcatctacagatttgtggcaccgggggagcgcccctccggtatgttcgactcgtccgtcctctgtgagtgctatgacgcgggctgtgcttggtatgagctcacgcccgccgagactacagttaggtacgagcgtacatgaacaccccggggcttcccgtgtgccaggaccatcttgagttttgggagggcgtctttacgggcctcacccatatagatgcccacttcctatctcagacaaagcagagtggggaaaactttccttaccggtagcgtaccaagccaccgtgtgcgctagggctcaagcccctcccccatcgtgggaccagatgtggaagtgtttgatccgcctcaagcccaccctcaatgggccaacacccctgctatacagactggcgctgttcagaatgaggtcaccctgacgcacccaatcaccaaatacatcatgacatgtatgtcggctgac

SEQ ID NO: 676 - DNA, 4881 bp, Hepatitis C virus
aacaccaaccgtcgcccacaggacgtcaagttcccgggtggcggtcagatcgttggtggagtttacttgttgccgcgcaggggccctagattgggtgtgcgcgcgacgaggaagacttccgagcggtgcaacctcgaggtagacgtcagcctatccccaaggcgcgtcggcccgagggcaggacctgggctcagcccgggtatccttggcccctctatggtaatgagggctgcgggtgggcgggatggctcctgctccccgtggctctcggcctagctggggccccacagacccccggcgtaggtcgcgcaatttgggtaaggtcatcgatacccttacgtgcggcttcgccgacctcatggggtacataccgctcgtcggcgcccctcttggagcgctgccagggccctggcgcatggcgtccgggttctggaagacggcgtgaactatgcaacagggaaccttcctggttgctctttctctatcttccttctggccctgctctcttgcctgactgtgccccttcggcctaccaagtgcgcaactccacggggctctaccacgtcaccaatgattgccctaactcgagtattgtgtacgaggcggctgatgccatcctgcacattccggggtgtgtcccttgcgttcgcgagggtaacgcctgaggtgttgggtgccgataacccccacggtggccaccagggacggcaaactccccacgacgcagctacgacgtcacatcgatctgcttgtcgggagcgccaccctttgttcggccctctacgtggggacctgtgcgggtctgtctttcttgtcggtcagctgttcaccttctctccgaggctccactggacgacgcagggctgcaattgttccatctatcccggccatataacgggtcaccgcatggcatgggatatgatgatgaactgtcccctacgacggcattggtagtagctcagctgctccggatcccacaagccatcttggacatgatcgctggtgctcactggggagtcctggcgggcatagcgtatttctccatggtggggaactggcgaaggtcctggtagtgctgctgctatttgccggcgttgacgcgaccacccacgtcactgggggaagcgtcgcccgcactacggctagttttgctagcttcctcacaccaggtgccaagcagaacatccagctgatcaacacaacggcagttggcacatcaataggacggccttgaactgcaatgatagcctccacaccggctggatagcaggacttttctattaccacaaattcaactcttcaggctgtccccagaggttggccagcgccgacccctcaccgactttgaccagggctggggccctatcagccatgccagcgtaagcggctccgaccaacgcccctactgctggcactaccccccaagaccttgcggtattgtgcccgcaaagagcgtgtgtggcccggatattgtttcactcccagccccgttgttgtgggaacgaccgacagggcgggcgtgcctacctacaactggggcgcgaatgaaacggacgttttcgtccttaacaacaccaggccaccgcggggcaatggttcggttgcacctggatgaactcaactggattcaccaaagtgtgcggagcgcccccttgtgtcatcgggggggggggcaacaacaccttgtactgccctactgattgtttccgcaagcatccggaagccacatactctcgtgcggctccggtccctggcttacacccaggtgcctggtcaactacccgtataggctttggcactatccttgtaccatcaactacaccatatttacagtcaggatgtatgtgggagggatcgagcacggctggaagctgcctgcaactggacgcggggtgaacgttgtgatctggaagacagggacaggtccgagctcagcccgttgctgttgtctaccacacagtggcaggtccttccgtgctccttcacgaccctgccagccttatcactggcctcatccacctccatcagaacattgtggacgtgcaatacttgtacggggtggggtcaagcatcgcgtcctgggccatcaagtgggagtacgtcgttctcctgttccttctgcttgcagaccgcgcgtctgctcctgcttgtggatgatgttactcatatcccaagtggaggcggctttggagaacctcataacactcaatgcagcatccctggccgggacgcacggccttgtgtccttcctcgtgttcttctgctttgcatgtaccttaagggtaggtgggtgcccggagcggtctacgccctctacgggatgtggcctctcctcctgctcctgctggcgttgcctcaacgggcatacgcgctggacacggaggtggccgcgtcgtgtgcggcgttgtgcttgtcgggttaatggcgctgactctgtcaccatattacaagcactatatcggctggtgcttatggtggcttcagtattttctgaccagagtagaagcgcaacttcacgtgtgggttccccccctcaacgccgaggggggcgtgacgctgtcatcttactcatgtgtgttgtacacccgactctggtatttgacatcaccaaacagctgctggccgtcttcggccccctttggattcttcaagccagtctgcttaagtcccctacttcgtgcgcgttcaaggccttcttcggatctgcgcgttagcgcggaagatggtcggaggccactacgtgcaaatggccatcatcaagttgggggcgcttactggcacctatgtttataaccatctcactcccctcgggactgggcgcacaacggcctgcgagatctggccgtggctgtagagccagtcgtcttctcccggatggagaccaagctcatcacgtggggggcagacaccgccgcgtgcggtgacatcatcaacgcttgcccgtctccgcccgtaagggccgggagatactgctcgggccagccgacggaatggtctccaagggttggagattgctggcgcccatcacagcgtacgcccagcaaacaaggggcctcctagggtgtataatcaccacttgactggccgggacaaaaaccaagcggagggtgaggtccagattgtgtcaactgctacccaaactttcttggcaacgtgcatcaatggggtatgctggactgtctaccacggggccgggacgaggccatcgcgtcacccaagggtcctgtcatccagatgtacaccaatgtagaccaagaccttgtgggctggcccgcccctcaaggtacccgctcattggcaccctgcacctgcggctcctcggacctttacctggtcacgaggccgccgatgtcatccccgtgcgcaggcggggtgatagcaggggcagcttgctttcgccccggcccatctcttacttgaaaggctcctcagggggtccgctgttgtgccccgcgggacacgccgtaggctattcagggccgcggtgtgcacccgtggagtggctaaggcggtggactttatccctgtggagaacctagagacaaccatgaggtccccggtgtttacggacaactcctccccaccagcagtgccccagagcttccaagtggccacctgcatgcccccacaggcagcggcaagagcaccaaggtcccggctgcatacgcagcccagggctacaaggtgctagtgctcaacccttctgttgctgcaacattgggttttggtgcttacatgccaaggctcatggggtcgatcctaacatcaggaccggggtgagaacaattaccactggcagccccatcacgtactccacctacggcaagttccttgccgacggtgggtgctcagggggtgcttatgacataataatttgtgcgagtgccactccacggatgccacatccatcttgggcatcggcactgtccttgatcaagcagagactgcgggggcgagactggttgtgctcgccaccgctacccctccgggctccatcactgtgcccatcctaatatcgaggaggttgctctgtccaccaccggagagatccctttctacggcaaggctatccccctcgaagtgatcaagggggggagacatctcatcttctgtcactcaaagaggaagtgcgacgagctcgccgcaagctggtcgcattgggcatcaatgccgtggcttactaccgcggtcttgacgtgtctgtcattccgaccagcggcgatgttgtcgtcgtggcaactgatgctctcatgactggctataccggcgacttcactcggtgatagactgcaacacgtgtgtcacccagacagtcgatttcagccttgaccctaccttcaccattgagacaaccacgcttcctcaggatgccgtctcccgcactcaacgtcggggcaggactggcagggggaagtaggcatctacagatttgtggcaccgggggagcgcccctccggaatgttcgactcgtccgtcctctgtgagtgctatgacgcgggctgtgcttggtatgagctcacgcccgccgagaccacagttaggtacgagcgtacatgaacaccccggggcttcccgtgtgccaggaccatcttgagttttgggagggcgtctttacgggcctcacccatatagatgcccacttcctatctcagacaaagcagagtggggaaaactttccttaccggtagcgtaccaagccaccgtgtgcgctagggctcaagcccctcccccatcgtgggaccagatgtggaagtgtttgatccgcctcaagcccaccctcaatgggccaacacccctgctatacagactggcgctgttcagaatgaagtcaccctgacgcacccaatcaccaaatacatcatgacatgtatgtcggctgac

SEQ ID NO: 677 - DNA, 4881 bp, Hepatitis C virus
aacaccaaccgtcgcccacaggacgtcaagttcccgggtggcggtcagatcgttggtggagtttacttgttgccgcgcaggggccctagattgggtgtgcgcgcgacgaggaagacttcggagcggtgcaacctcgaggtagacgtcagcctatccccaaggcgcgtcggcccgagggcaggacctgggctcagcccgggtatccttggcccctctatggcaatgagggctgcgggtgggcgggatggctcctgctccccgtggctctcggcctagctggggccccacagacccccggcgtaggtcgcgcaatttgggtaaggtcatcgatacccttacgtgcggcttcgccgacctcatggggtacataccgctcgtcggcgcccctcttggagcgctgccagggccctggcgcatggcgtccgggttctggaagacggcgtgaactatgcaacagggaaccttcctggttgctctttctctatcttccttctggccctgctctcttgcctgactgtgccccttcggcctaccaagtgcgcaactccacggggctctaccatgtcaccaatgattgccctaactcgagtattgtgtacgaggcggctgatgccatcctgcacattccggggtgtgtcccttgcgttcgcgagggtaacgcctgaggtgttgggtgtcgataacccccacggtggccaccagggacggcaaactccccacgacgcaactacgacgtcacatcgatctgcttgtcgggagcgccaccctttgttcggccctctacgtggggacctgtgcgggtctgtctttcttgtcggtcagctgttcaccttctctccgaggctccactggacgacgcagggctgcaattgttccatctatcccggccatataacgggtcaccgcatggcatgggatatgatgatgaactgtcccctacgacggcattggtagtagctcagctgctccggatcccacaagccatcttggacatgatcgctggtgctcactggggagtcctggcgggcatagcgtatttctccatggtggggaactggcgaaggtcctggtagtgctgctgctatttgccggcgttgacgcgaccacccacgtcaccgggggaagcgtcgcccgcactacgtctagttttactaacctcctcacatcaggtgccaagcagaacatccagctgatcaacacaacggcagttggcacatcaataggacggccttgaactgcaatgatagcctcaacaccggctggatagcagggcttttctattaccacaaattcaactcttcaggctgtccccagaggttggccagtgccgacccctcaccgactttgaccagggctggggccctatcagtcatgccagcgtaaccggctccgaccaacgcccctactgctggcactaccccccaagaccttgcggtattgtgcccgcaaagagcgtgtgtggcccggatattgcttcactcccagccccgttgttgtgggaacgaccgacagggcgggcgtgcctacctacaactggggcgcgaatgaaacggacgttttcgtccttaacaacaccaggccaccgcggggcaatggttcggttgcacctggatgaactcaactggattcaccaaagtgtgcggagcgcccccttgtgtcatcgggggggggggcaacaacaccttgtactgccctactgattgtttccgcaagcatccggaagccacatactctcgtgcggctccggtccctggcttacacccaggtgcctggtcaactacccgtataggctttggcactatccttgtaccatcaactacaccatatctaaagtcaggatgtatgtgggaggggtcgagcacggctggaagctgcctgcaactggacgcggggtgaacgttgtgatctggaagacagggacaggtccgagctcagcccgttgctgttgtctaccacacagtggcaggttcttccgtgttccttcacgaccctgccagccttatcactggcctcattcacctccatcagaacattgtggacgtgcagtacttgtacggggtggggtcaagcatcgcgtcctgggccatcaagtgggagtacgtcgttctcctgttccttctgcttgcagaccgcgcgtctgctcctgcttgtggatgatgttactcatatcccaagtggaggcggctttggagaacctcataacactcaatgcagcatccttggccgggacgcacggccttgtgtccttcctcgtgttcttctgctttgcatgtacctgaagggtaggtgggtgcccggagcggtctacgccctctacgggatgtggcctctcctcctgctcctgctggcgttgcctcaacgggcatacgcgctggacacggaggtggccgcgtcgtgtgcggcgttgtgcttgtcgggttaatggcgctgaccctgtcaccatattacaagcactatatcagctggtgcttatggtggcttcagtattttctgaccagagtggaagcgcaatttcacgtgtgggttccccccctcaacgccgaggggggcgtgacgctgtcatcttactcatgtgtgttgtacacccgactctggtatttgacatcaccaaacagctgctggccgtcttcggacccctttggattctccaagccagtctgcttaagtcccctactttgtgcgcgttcagggccttctccggatctgcgcgttggcgcggaagatggtcggaggccactacgtgcaaatggccatcatcaagttgggggcgcttactggcacctatgtttataaccatctcactcccctcgggactgggcgcacaacggcctgcgagatctggccgtggctgtagagccagtcgtcttctcccggatggagaccaagctcatcacgtggggggcagacaccgccgcgtgcggtgacatcatcaacgcttgcccgtctccgcccgtaagggccgggagatactgctcgggccagctgacggaatggtctccaagggttggagattgctggcgcccatcacagcgtacgcccagcaaacaaggggcctcctagggtgtataatcaccacctgactggccgggacaaaaaccaagcggagggtgaggtccagattgtgtcaactgctacccaaactttcttggcaacgtgcatcaatggggtatgctggactgtctaccacggggccgggacgaggccatcgcatcacccaagggtcctgtcattcagatgtacaccaatgtagaccaggaccttgtgggctggcccgcccctcaaggtacccgctcattggcaccctgcacctgcggctcctcggacctttacctggtcacgaggccgccgatgtcatccccgtgcgcaggcggggtgatagcaggggcagcttgctttcgccccggcccatctcttacttgaaaggctcctcagggggtccgctgttgtgccccgcgggacacgccgtaggctattcagggccgcggtgtgcacccgtggagtggctaaggcggtggactttatccctgtggagaacctagagacaaccatgaggtccccggtgtttacggacaactcctccccaccagcagtgccccagagcttccaagtggccacctgcatgctcccacaggcagcggcaagagcaccaaggtcccggctgcatacgcagcccagggctacaaggtgctagtgctcaacccttctgtcgctgcaacactgggctttggtgcttacatgccaaggctcatggggtcgatcctaacatcaggaccggggtgagaacaattaccactggcagccccatcacgtactccacctacggcaagttccttgccgacggcgggtgctcagggggtgcttatgacataataatttgtgcgagtgccactccacggatgccacatctatcttgggcatcggcactgtccttgatcaagcagagactgcgggggcgagactggttgtgctcgccaccgctactcctccgggctccatcaccgtgcccatcccaatatcgaggaggttgctctgtccaccaccggagagatccctttctacggcaaggctatccccctcgaagtgatcaagggggggagacatctcatcttctgccactcaaagaggaagtgcgacgagctcgccgcaagctggtcgcattgggcatcaatgccgtggcttactaccgcggtcttgacgtgtctgtcattccgaccagcggcgatgttgtcgtcgtggcaactgatgctctcatgaccggctataccggcgacttcactcggtgatagactgcaacacgtgtgtcacccagacagtcgatttcagccttgaccctaccttcaccattgagacaaccacgcttccccaggatgccgtctcccgcactcaacgtcggggcaggactggcagggggaagtaggcatctacagatttgtggcaccgggggagcgcccctctggtatgttcgactcgtctgtcctctgtgagtgctatgacgcgggctgtgcttggtatgagctcacgcccgccgagactacagttaggtacgagcgtacatgaacaccccggggcttcccgtgtgccaggaccatcttgagttttgggagggcgtctttacgggcctcacccatatagacgcccacttcctatctcagacaaagcagagtggggaaaactttccttaccggtagcgtaccaagccaccgtgtgcgctagggctcaagcccctcccccatcgtgggaccagatgtggaagtgtttgatccgcctcaaacccaccctcaatgggccaacacccctgctatacagactggcgctgttcagaatgaaatcaccctgacgcacccaatcaccaagtacatcatgacatgtatgtcggctgac

SEQ ID NO: 678 - DNA, 4881 bp, Hepatitis C virus
aacaccaaccgtcgcccacaggacgtcaagttcccgggtggcggtcagatcgttggtggagtttacttgttgccgcgcaggggccctagattgggtgtgcgcgcgacgaggaagacttcggagcggtgcaacctcgaggtagacgtcagcctatccccaaggcgcgtcggcccgagggcaggacctgggctcagcccgggtatccttggcccctctatggcaatgagggctgcgggtgggcgggatggctcctgctccccgtggctctcggcctagctggggccccacagacccccggcgtaggtcgcgcaatttgggtaaggtcatcgatacccttacgtgcggcttcgccgacctcatggggtacataccgctcgtcggcgcccctcttggagcgctgccagggccctggcgcatggcgtccgggttctggaagacggcgtgaactatgcaacagggaaccttcctggttgctctttctctatcttccttctggccctgctctcttgcctgactgtgccccttcggcctaccaagtgcgcaactccacggggctctaccatgtcaccaatgattgccctaactcgagtattgtgtacgaggcggctgatgccatcctgcacattccggggtgtgtcccttgcgttcgcgagggtaacgcctgaggtgttgggtgtcgataacccccacggtggccaccagggacggcaaactccccacgacgcaactacgacgtcacatcgatctgcttgtcgggagcgccaccctttgttcggccctctacgtggggacctgtgcgggtctgtctttcttgtcggtcagctgttcaccttctctccgaggctccactggacgacgcagggctgcaattgttccatctatcccggccatataacgggtcaccgcatggcatgggatatgatgatgaactgtcccctacgacggcattggtagtagctcagctgctccggatcccacaagccatcttggacatgatcgctggtgctcactggggagtcctggcgggcatagcgtatttctccatggtggggaactggcgaaggtcctggtagtgctgctgctatttgccggcgttgacgcgaccacccacgtcaccgggggaagcgccgcccgcactacgtctagttttgctaacctcctcacatcaggtgccaagcagaacatccagctgatcaacacaacggcagttggcacatcaataggacggccttgaactgcaatgatagcctcaacaccggctggatagcagggcttttctattaccacaaattcgactcttcaggctgtccccagaggttggccagtgccgacccctcaccgactttgaccagggctggggccctatcagtcatgccagcgtaaccggctccgaccaacgcccctactgctggcactaccccccaagaccttgcggtattgtgcccgcaaagagcgtgtgtggcccggatattgcttcactcccagccccgttgttgtgggaacgaccgacagggcgggcgtgcctacctacaactggggcgcgaatgaaacggacgttttcgtccttaacaacaccaggccaccgcggggcaatggttcggttgcacctggatgaactcaactggattcaccaaagtgtgcggagcgcccccttgtgtcatcgggggggggggcaacaacaccttgtactgccccactgattgtttccgcaaacatccggaagccacatactctcgtgcggctccggtccctggcttacacccaggtgcctggtcaactacccgtataggctttggcactatccttgtaccatcaactacaccatatctaaagtcaggatgtatgtgggaggggtcgagcacggctggaagctgcctgcaactggacgcggggtgaacgttgtgatctggaagacagggacaggtccgagctcagcccgttgctgttgtctaccacacagtggcaggtccttccgtgttccttcacgaccctgccagccttatcactggcctcatccacctccatcagaacattgtggacgtgcagtacttgtacggggtggggtcaagcatcgcgtcctgggccatcaagtgggagtacgtcgttctcctgttccttctgcttgcagaccgcgcgtctgctcctgcttgtggatgatgttactcatatcccaagtggaggcggctttggagaacctcataacactcaatgcagcatccctggccgggacgcacggccttgtgtccttcctcgtgttcttctgctttgcatgtacctgaagggtaggtgggtgcccggagcggtctacgccctctacgggatgtggcctctcctcctgctcctgctggcgttgcctcaacgggcatacgcgctggacacggaggtggccgcgtcgtgtgcggcgttgtgcttgtcgggttaatggcgctgactctgtcaccatattacaagcactatatcagctggtgcttatggtggcttcagtattttctgaccagagtagaagcacaatttcacgtgtgggttccccccctcaacgccgaggggggcgtgacgctgtcatcttactcatgtgtgttgtacacccgactctggtatttgacatcaccaaacagctgctggccgtcttcggacccctttggattctccaagccagtctgcttaagtcccctacttcgtgcgcgttcagggccttctccggatctgcgcgttagcgcggaagatggtcggaggccactacgtgcaaatggccatcatcaagttgggggcgcttactggcacctatgtttataaccatctcactcccctcgggactgggcgcacaacggcctgcgagatctggccgtggctgtagagccagtcgtcttctcccggatggagaccaaactcatcacgtggggggcagacaccgccgcgtgcggtgacatcatcaacgcttgcccgtctccgcccgtaagggccgggagatactgctcgggccagctgacggaatggtctccaagggttggagattgctggcgcccatcacagcgtacgcccagcaaacaaggggcctcctagggtgtataatcaccacctgactggccgggacaaaaaccaagcggagggtgaggtccagattgtgtcaactgctacccaaactttcttggcaacgtgcatcaatggggtatgctggactgtctaccacggggccgggacgaggccatcgcatcacccaagggtcctgtcattcagatgtacaccaatgtagaccaggaccttgtgggctggcccgcccctcaaggtacccgctcattggcaccctgcacctgcggctcctcggacctttatctggtcacgaggccgccgatgtcatccccgtgcgcaggcggggtgatagcaggggcagcttgctttcgccccggcccatctcttacttgaaaggctcctcagggggtccgctgttgtgccccgcgggacacgccgtaggctattcagggccgcggtgtgcacccgtggagtggctaaggcggtggactttatccctgtggagaacctagagacaaccatgaggtccccggtgtttacggacaactcctccccaccagcagtgccccagagcttccaagtggccacctgcatgctcccacaggcagcggcaagagcaccaaggtcccggctgcatacgcagcccagggctacaaggtgctagtgctcaacccttctgtcgctgcaacactgggctttggtgcttacatgccaaggctcatggggtcgatcctaacatcaggaccggggtgagaacaattaccactggcagccccattacgtactccacctacggcaagttccttgccgacggcgggtgctcagggggtgcttatgacataataatttgtgcgagtgccactccacggatgccacatctatcttgggcatcggcaccgtccttgatcaagcagagactgcgggggcgagactggttgtgctcgccaccgctacccctccgggttccatcactgtgcccatcccaatatcgaggaggttgctctgtccaccaccggagagatccctttctacggcaaggctatccccctcgaagtgatcaagggggggagacatctcatcttctgccactcaaagaggaagtgcgacgagctcgccgcaagctggtcgcattgggcatcaatgccgtggcttactaccgcggtcttgacgtgtctgtcattccgaccagcggcgatgttgtcgtcgtggcaactgatgctctcatgaccggctataccggcgacttcactcggtgatagactgcaacacgtgtgtcacccagacagtcgatttcagccttgaccctaccttcaccattgagacaaccacgcttccccaggatgccgtctcccgcactcaacgtcggggtaggactggcagggggaagtaggcatctacagatttgtggcaccgggggagcgcccctccggtatgttcgactcgtccgtcctctgtgagtgctatgacgcgggctgtgcttggtatgagctcacgcccgccgagactacagttaggtgcgagcgtacatgaacaccccggggcttcccgtgtgccaggaccatcttgagttttgggagggcgtctttacgggcctcacccatatagacgcccacttcctatctcagacaaagcagagtggggaaaactttccttaccggtagcgtaccaagccaccgtgtgcgctagggctcaagcccctcccccatcgtgggaccagatgtggaagtgtttgacccgcctcaaacccaccctcaatgggccaacacccctgctatacagactggcgctgttcagaatgaaatcaccctgacgcacccaatcaccaagtacatcatgacatgtatgtcggctgac

SEQ ID NO: 679 - DNA, 4880 bp, Hepatitis C virus
aacaccaaccgtcgcccacaggacgtcaagttcccgggcggcggtcagatcgttggtggagtttacttgttgccgcgcaggggccctagattgggtgtgcgcgcgacgaggaagacttcggagcggtgcaacctcgaggtagacgtcagcctatccccaaggcgcgtcggcccgagggcaggacctgggctcagcccgggtatccttggcccctctatggcaatgagggctgcgggtgggcgggatggctcctgctccccgtggctctcggcctagctggggccccacagacccccggcgtagatcgcgcaatttgggtaaggtcatcgatacccttacgtgcggcttcgccgacctcatggggtacataccgctcgtcggcgcccctcttggagcgctgccagggccctggcgcatggcgtccgggttctggaagacggcgtgaactatgcaacagggaaccttcctggttgctctttctctatcttccttctggccctgctctcttgcctgactgtgccccttcggcctaccaagtgcgcaactccacggggctctaccatgtcaccaatgattgccctaactcgagtattgtgtacgaggcggctgatgccatcctgcacattccggggtgtgtcccttgcgttcgcgagggtaacgcttgaggtgttgggtgtcgataacccccacggtggccaccagggacggcaaactccccacgacgcaactacgacgtcacatcgatctgcttgtcgggagcgccaccctttgttcggccctctacgtggggacctgtgcgggtctgtctttcttgtcggtcagctgttcaccttctctccgaggctccactggacgacgcagggctgcaattgttccatctatcctggccatataacgggtcaccgcatggcatgggatatgatgatgaactgtcccctacgacggcattggtagtagctcagctgctccggatcccacaagccatcttggacatgatcgctggtgctcactggggagtcctggcgggcatagcgtatttctccatggtggggaactggcgaaggtcctggtagtgctgctgctatttgccggcgttgacgcgaccacccacgtcaccgggggaagcgtcgcccgcactacgtctagttttgctaacctcctcacatcaggtgccaagcagaacattcagctgatcaacacaacggcagttggcacatcaataggacggccttgaactgcaatgatagcctcaacaccggctggatagcagggcttttctattaccacaaattcaactcttcaggctgtccccagaggttggccagtgccgacccctcaccgactttgaccagggctggggccctatcagtcatgccagcgtaaccggctccgaccaacgcccctactgctggcactaccccccaagaccttgcggtattgtgcccgcaaagagcgtgtgtggcccggatattgcttcactcccagccccgttgttgtgggaacgaccgacagggcgggcgtgcctacctacaactggggcgcgaatgaaacggacgttttcgtccttaacaacaccaggccaccgcggggcaatggttcggttgcacctggatgaactcaactggattcaccaaagtgtgcggagcgcccccttgtgtcatcgggggggggggcaacaacaccttgtactgccctactgattgtttccgcaagcatccggaagccacatactctcgtgcggctccggtccctggcttacacccaggtgcctggtcaactacccgtataggctttggcactatccttgtaccattaactacaccatatctaaagtcaggatgtatgtgggaggggtcgagcacggctggaagctgcttgcaactggacgcggggtgaacgttgtgatctggaagacagggacaggtccgagctcagcccgttgctgttgtctaccacacagtggcaggtccttccgtgttccttcacgaccctgccagccttatcactggcctcatccacctccatcagaacattgtggacgtgcagtacttgtacggggtggggtcaagcatcgcgtcctgggccatcaagtgggagtacgtcgttctcctgttccttctgcttgcagaccgcgcgtctgctcctgcttgtggatgatgttactcatatcccaagtggaggcggctttggagaacctcataacactcaatgcagcatccctggccgggacgcatggccttgtgtccttcctcgtgttcttctgctttgcatgtacctgaagggtaggtgggtgcccggagcggtctacgccctctacgggacgtggcctctcctcctgctcctgctggcgttgcctcaacgggcatacgcgctggacacggaggtggccgcgtcgtgtgcggcgttgtgcttgtcgggttaatggcgctgactctgtcaccatattacaagcactatatcagctggtgcttatggtggcttcagtattttctgaccagagtagaagcgcaatttcacgtgtgggttccccccctcaacgccgaggggggcgtgacgctgtcatcttactcatgtgtgttgtacacccgactctggtatttgacatcaccaaacagctgctggccgtcttcggacccctttggattctccaagccagtctgcttaagtcccctacttcgtgcgcgttcagggccttctccggatctgcgcgttagcgcggaagatggtcggaggccactacgtgcaaatggccatcatcaagttgggggcgcttactggcacctatgtttataaccatctcactcccctcgggactgggcgcacaacggcctgcgagatctggccgtggctgtagagccagtcgtcttctcccggatggagaccaagctcatcacgtggggggcagacaccgccgcgtgcggtgacatcatcaacgcttgcccgtctccgcccgtaagggccgggagatactgctcgggccagctgacggaatggtctccaagggttggagattgctggcgcccatcacagcgtacgcccagcaaacaaggggcctcctagggtgtataatcaccacctgactggccgggacaagaaccaagcggagggtgaggtccagattgtgtcaactgctacccaaactttcttggcaacgtgcatcaatggggtatgctggactgtctaccacggggccgggacgaggccatcgcatcacccaagggtcctgtcatccagatgtacaccaatgtagaccaggaccttgtgggctggcccgcccctcaaggtacccgctcattggcaccctgcacctgcggctcctcggacctttacctggtcacgaggccgccgatgtcatccccgtgcgcaggcggggtgatagcaggggcagcttgctttcgccccggcccatctcttacttgaaaggctcctcagggggtccgctgttgtgccccgcgggacacgccgtaggctattcagggccgcggtgtgcacccgtggagtggctaaggcggtggactttatccctgtggagaacctagagacaaccatgaggtccccggtgtttacggacaactcctccccaccagcagtgccccagagcttccaagtggccacctgcatgctcccacaggcagcggcaagagcaccaaggtcccggctgcatacgcagctcagggctacaaggtgctagtgctcaacccttctgtcgctgcaacactgggctttggtgcttacatgccaaggctcatggggtcgatcctaacatcaggaccggggtgagaacaattaccactggcagccccatcacgtactccacctacggcaagttccttgccgacggcgggtgctcagggggtgcttatgacataataatttgtgcgagtgccactccacggatgccacatctatcttgggcatcggcactgtccttgatcaagcagagactgcgggggcgagactggttgtgctcgccaccgctacccctccgggctccatcactgtgcccatcccaatatcgaggaggttgctctgtccaccaccggagagatccctttctacggcaaggctatccccctcgaagtgatcaagggggggagacatctcatcttctgccactcaaagaggaagtgcgacgagctcgccgcaagctggtcgcattgggcatcaatgccgtggcttactaccgcggtcttgacgtgtctgtcattccgaccagcggcgatgttgtcgtcgtggcaactgatgctctcatgaccggctataccggcgacttcactcggtgatagactgcaacacgtgtgtcacccagacagtcgatttcagccttgaccctaccttcaccattgagacaaccacgcttccccaggatgccgtctcccgcactcaacgtcggggcaggactggcagggggaagtaggcatctacagatttgtggcaccgggggagcgcccctccggtatgttcgactcgtccgtcctctgtgagtgctatgacgcgggctgtgcttggtatgagctcacgcccgccgagactacagttaggtacgagcgtacatgaacaccccggggcttcccgtgtgccaggaccatcttgagttttgggagggcgtctttacgggcctcacccatatagacgcccacttcctatctcagacaaagcagagtggggaaaactttccttaccggtagcgtaccaagccaccgtgtgcgctagggctcaagcccctcccccatcgtgggaccagatgtggaagtgtttgatccgcctcaaacccaccctcaatgggccaacaccctgctatacagactggcgctgttcagaatgaaatcaccctgacgcacccaatcaccaagtacatcatgacatgtatgtcggctgac

SEQ ID NO: 680 - DNA, 4881 bp, Hepatitis C virus
aacaccaaccgtcgcccacaggacgtcaagttcccgggtggcggtcagatcgttggtggagtttacttgttgccgcgcaggggccctagattaggtgtgcgcgcgacgaggaagacttccgagcggtgcaacctcgaggtagacgtcagcctatccccaaggcgcgtcggcccgagggcaggacctgggctcagcccgggtatccttggcccctctatggcaatgagggctgcgggtgggcgggatggctcctgctccccgtggctctcggcctagctggggccccacagacccccggcgtaggtcgcgcaatttgggtaaggtcatcgatacccttacgtgcggcttcgccgacctcatggggtacataccgctcgtcggcgcccctcttggagcgctgccagggccctggcgcatggcgtccgggttctggaagacggcgtgaactatgcaacagggaaccttcctggttgctctttctctatcttccttctggccctgctctcttgcctgactgtgccccttcggcctaccaagtgcgcaactccacggggctctaccatgtcaccaatgattgccctaactcaagtattgtgtacgaggcggctgatgccatcctgcacattccggggtgtgtcccttgcgttcgcgagggtaacgcctgaggtgttgggtgtcgataacccccacggtggccaccagggacggcaaactccccacgacgcaactacgacgtcacatcgatctgcttgtcgggagcgccaccctttgttcggccctctacgtggggacctgtgcgggtctgtctttcttgtcggtcagctgttcaccttctctccgaggctccactggacgacgcagggctgcaattgttccatctatcccggccatataacgggtcaccgcatggcatgggatatgatgatgaactgtcccctacgacggcattggtagtagctcagctgctccggatcccacaagccatcttggacatgatcgctggtgctcactggggagtcctggcgggcatagcgtatttctccatggtggggaactggcgaaggtcctggtagtgctgctgctatttgccggcgttgacgcgaccacccacgtcaccgggggaagtgccgcccgcactacgtctagttttgctaacctcctcacatcaggtgccaagcagaacatccagctgatcaacacaacggcagttggcacatcaataggacggccttgaactgcaatgatagcctcaacaccggctggatagcagggcttttctattaccacaaattcaactcttcaggctgtccccagaggttggccagtgccgacccctcaccgactttgaccagggctggggccctatcagtcatgccagcgtaaccggctctgaccaacgcccctactgctggcactaccccccaagaccttgcggtattgtgcccgcaaagagcgtgtgtggcccggatattgcttcactcccagccccgttgttgtgggaacgaccgacagggcgggcgtgcctacctacaactggggcgcgaatgaaacggacgttttcgtccttaacaacaccaggccaccgcggggcaatggttcggttgcacctggatgaactcaactggattcaccaaagtgtgcggagcgcccccttgtgtcatcgggggggggggcaacaacaccttgtactgccctactgattgtttccgcaagcatccggaagccacatactctcgtgcggctccggtccctggcttacacccaggtgcctggtcaactacccgtataggctttggcactatccttgtaccatcaactacaccatatctaaagtcaggatgtatgtgggaggggtcgagcacggctggaagctgcctgcaactggacgcggggtgaacgttgtgatctggaagacagggacaggtccgagctcagcccgttgctgttgtctaccacacagtggcaggtccttccgtgttccttcacgaccctgccagccttatcactggcctcatccacctccatcagaacattgtggacgtgcagtacttgtacggggtggggtcaagcatcgcgtcctgggccatcaagtgggagtacgtcgttctcctgttccttctgcttgcagaccgagcgtctgctcctgcttgtggatgatgttactcatatcccaagtggaggcggctttggagaacctcataacactcaatgcagcatccttggccgggacgcacggccttgtgtccttcctcgtgttcttctgctttgcatgtacctgaagggtaggtgggtgcccggagcggtctacgccctctacgggatgtggcctctcctcctgctcctgctggcgttgcctcaacgggcatacgcgctggacacggaggtggccgcgtcgtgtgcggcgttgtgcttgtcgggttaatggcgctgactctgtcaccatattacaagcactatatcagctggtgcttatggtggcttcagtattttctgaccagagtagaagcgcaattgcacgtgtgggttccccccctcaacgccgaggggggcgtgacgctgtcatcttactcatgtgtgttgtacacccgactctggtatttgacatcaccaaacagctgctggccgtcttcggacccctttggattctccaagccagtctgcttaagtcccctacttcgtgcgcgttcagggccttctccggatctgcgcgttagcgcggaagatggtcggaggccactacgtgcaaatggccatcatcaagttgggggcgcttactggcacctatgtttataaccatctcactcccctcgggactgggcgcacaacggcctgcgagatctggccgtggctgtagagccagtcgtcttctcccggatggagaccaaactcatcacgtggggggcagacaccgccgcgtgcggtgacatcatcaacgcttgcccgtctccgcccgtaagggccgggagatactgctcgggccagctgacggaatggtctccaagggttggagattgctggcgcccatcacagcgtacgcccagcaaacaaggggcctcctagggtgtataatcaccacctgactggccgggacaaaaaccaagcggagggtgaggtccagattgtgtcaactgctacccaaactttcttggcaacgtgcatcaatggggtatgctggactgtctaccacggggccgggacgaggccatcgcatcacccaagggtcctgtcattcagatgtacaccaatgtagaccaggaccttgtgggctggcccgcccctcaaggtacccgctcattggcaccctgcacctgcggctcctcggacctttacctggtcacgaggccgccgatgtcatccccgtgcgcaggcggggtgatagcaggggcagcttgctttcgccccggcccatctcttacttgaaaggctcctcagggggtccgctgttgtgccccgcgggacacgccgtaggctattcagggccgcggtgtgcacccgtggagtggctaaggcggtggactttatccctgtggagaacctagagacaaccatgaggtccccggtgtttacggacaactcctccccaccagcagtgccccagagcttccaagtggccacctgcatgctcccacaggcagcggcaagagcaccaaggtcccggctacatacgcagcccagggctacaaggtgctagtgctcaacccttctgtcgctgcaacactgggctttggtgcttacatgccaaggctcatggggtcgatcctaacatcaggaccggggtgagaacaattaccactggcagccccatcacgtactccacctacggcaagttccttgccgacggcgggtgctcagggggtgcttatgacataataatttgtgcgagtgccactccacggatgccacatctatcttgggcatcggcactgtccttgatcaagcagagactgcgggggcgagactggttgtgctcgccaccgctacccctccgggctccatcactgtgcccatcccaatatcgaggaggttgctctgtccaccaccggagagatccctttctacggcaaggctatccccctcgaagtgatcaagggggggagacatctcatcttctgccactcaaagaggaagtgcgacgagctcgccgcaagctggtcgcattgggcatcaatgccgtggcttactaccgcggtcttgacgtgtccgtcattccgaccagcggcgatgttgtcgtcgtggcgactgatgctctcatgaccggctataccggcgacttcactcggtgatagactgcaacacgtgtgtcacccagacagtcgatttcagccttgaccctaccttcaccattgagacaaccacgcttccccaggatgccgtctcccgcactcaacgtcggggcaggactggcagggggaagtaggcatctacagatttgtggcaccgggggagcgcccctccggtatgttcgactcgtccgtcctctgtgagtgctatgacgcgggctgtgcttggtatgagctcacgcccgccgagactacagttaggtacgagcgtacatgaacaccccggggcttcccgtgtgccaggaccatcttgagttttgggagggcgtctttacgggcctcacccatatagatgcccacttcctatctcagacaaagcagagtggggaaaactttccttaccggtagcgtaccaagccaccgtgtgcgctagggcccaagcccctcccccatcgtgggaccagatgtggaagtgtttgatccgcctcaaacccaccctcaatgggccaacacccctgctatacagactggcgctgttcagaatgaaatcaccctgacgcacccaatcaccaagtacatcatgacatgtatgtcggctgac

SEQ ID NO: 681 - DNA, 4880 bp, Hepatitis C virus
aacaccaaccgtcgcccacaggacgtcaagttcccgggtggcggtcagatcgttggtggagtttacttgttgccgcgcaggggccctagattgggtgtgcgcgcgacgaggaagacttcggagcggtgcaacctcgaggtagacgtcagcctatccccaaggcgcgtcggcccgagggcaggacctgggctcagcccgggtatccttggcccctctatggcaatgagggctgcgggtgggcgggatggctcctgctccccgtggctctcggcctagctggggccccacagacccccggcgtaggtcgcgcaatttgggtaaggtcatcgatacccttacgtgcggcttcgccgacctcatggggtacataccgctcgtcggcgcccctcttggagcgctgccagggccctggcgcatggcgtccgggttctggaagacggcgtgaactatgcaacagggaaccttcctggttgctctttctctatcttccttctggccctgctctcttgcctgactgtgccccttcggcctaccaagtgcgcaactccacggggctctaccatgtcaccaatgattgccctaattcgagtattgtgtacgaggcggctgatgccatcctgcacattccggggtgtgtcccttgcgttcgcgagggtaacgcctgaggtgttgggtgtcgataacccccacggtggccaccagggacggcaaactccccacgacgcaactacgacgtcacatcgatctgcttgtcgggagcgccaccctttgttcggccctctacgtggggacctgtgcgggtctgtctttcttgtcggtcagctgttcaccttctctccgaggctccactggacgacgcagggctgcaattgttccatctatcccggccatataacgggtcaccgcatggcatgggatatgatgatgaactgtcccctacgacggcattggtagtagctcagctgctccggatcccacaagccatcttggacatgatcgctggtgctcactggggagtcctggcgggcatagcgtatttctccatggtggggaactggcgaaggtcctggtagtgctgctgctatttgccggcgttgacgcgaccacccacgtcaccgggggaagcgtcgcccgcactacgtctagttttgctaacctcctcacatcaggtgccaagcagaacatccagctgatcaacacaacggcagttggcacatcaataggacggccttgaactgcaatgatagcctcaacaccggctggatagcagggcttttctattaccacaaattcaactcttcaggctgtccccagaggttggccagtgccgacccctcaccgactttgaccagggctggggccctatcagtcatgccagcgcaaccggctccgaccaacgcccctactgctggcactaccccccaagaccttgcggtattgtgcccgcaaagagcgtgtgtggcccggatattgcttcactcccagccccgttgttgtgggaacgaccgacagggcgggcgtgcctacctacaactggggcgcgaatgaaacggacgttttcgtccttaacaacaccaggccaccgcggggcaatggttcggttgcacctggatgaactcaactggattcaccaaagtgtgcggagcacccccttgtgtcatcggggggggggcaacaacaccttgtactgccctactgattgtttccgcaagcatccggaagccacatactctcgtgcggctccggtccctggcttacacccaggtgcctggtcaactacccgtataggctttggcactatccttgtaccatcaactacaccatatctaaagtcaggatgtatgtgggaggggtcgagcatagctggaagctgcctgcaactggacgcggggtgaacgttgtgatctggaagacagggacaggtccgagctcagcccgttgctgttgtctaccacacagtggcaggtccttccgtgttccttcacgaccctgccagccttatcactggcctcatccacctccatcagaacattgtggacgtgcagtacttgtacggggtggggtcaagcatcgcgtcctgggccatcaagtgggagtacgtcgttctcctgttccttctgcttgcagacggcgcgtctgctcctgcttgtggatgatgttactcatatcccaagtggaggcggctttggagaacctcataacactcaatgcagcatccctggccgggacgcacggccttgtgtccttcctcgtgttcttctgctttgcatgtacctgaagggtaggtgggtgcccggagcggtctacgccctctacgggatgtggcctctcctcctgctcctgctggcgttgcctcaacgggcatacgcgctggacacggaggtggccgcgtcgtgtgcggcgttgtgcttgtcgggttaatggcgctgactctgtcaccatattacaagcactatatcagctggtgcttatggtggcttcagtattttctgaccagagtagaagcgcaatttcacgtgtgggttccccccctcaacgtcgaggggggcgtgacgctgtcatcttactcatgtgtgttgtacacccgactctggtatttgacatcaccaaacagctgctggccgtcttcggacccctttggattctccaagccagtctgcttaaggcccctacttcgtgcgcgttcagggccttctccggatctgcgcgttagcgcggaagatggtcggaggccactacgtgcaaatggccatcatcaagttgggggcgcttactggcacctatgtttataaccatctcactcccctcgggactgggcgcacaacggcctgcgagatctggccgtggctgtagagccagtcgtcttctcccggatggagaccaagctcatcacgtggggggcagacaccgccgcgtgcggtgacatcatcaacgcttgcccgtctccgcccgcaagggccgggagatactgctcgggccagctgacggaatggtctccaagggttggagattgctggcgcccatcacagcgtacgcccagcaaacaaggggcctcctagggtgtataatcaccagctgactggccgggacaaaaaccaagcggagggtgaggtccagattgtgtcaactgctacccaaactttcttggcaacgtgcatcaatggggtatgctggactgtctaccacggggccgggacgaggacatcgcatcacccaagggtcctgtcattcagatgtacaccaatgtagaccaggaccttgtgggctggcccgcccctcaaggtacccgctcattggcaccctgcacctgcggctcctcggacctttacctggtcacgaggcagccgatgttatccccgtgcgcaggcggggtgatagcaggggcagcttgctttcgccccggcccatttcttacttgaaaggctcctcagggggtccgctgttgtgccccgcgggacacgccgtaggcaattcagggccgcggtgtgcacccgtggagtggctaaggcggtggactttatccctgtggagaacctagagacaaccatgaggtccccggtgtttacggacaactcctccccaccagcagtgccccagagcttccaagtggccacctgcatgctcccacaggcagcggcaagagcaccaaggtcccggctgcatacgcagcccagggctacaaggtgctagtgctcaacccttctgtcgctgcaacactgggctttggtgcttacatgtcaaggctcatggggtcgatcctaacatcaggaccggggtgagaacaattaccactggcagccccatcacgtactccacctacggcaagttccttgccgacggcgggtgctcagggggtgcttatgacataataatttgtgagagtgccactccacggatgccacatctatcttgggcatcggcactgtccttgatcaagcagagactgcgggggcgagactggttgtgctcgccaccgctacccctccgggctccatcactgtgcccctcccaatatcgaggaggttgctctgtccaccaccggagagatccctttctacggcaaggctatccccctcgaagtgatcaagggggggagacatctcatcttctgccactcaaagaggaagtgcgacgagctcgccgcaaactggtcgcattgggcatcaatgccgtggcttactaccgcggtcttgacgtgtctgtcattccgaccagcggcgatgttgtcgtcgtggcaactgatgctctcatgaccggctataccggcgacttcgctcggtgatagactgcaacacgtgtgtcacccagacagtcgatttcagccttgaccctaccttcaccattgagacaaccacgcttccccaggatgccgtctcccgcactcaacgtcggggcaggactggcagggggaagtcggcatctacagatttgtggcaccgggggagcgcccctccggtatgttcgactcgtccgtcctctgtgagtgctatgacgcgggctgtgcttggtatgagctcacgcccgccgagactacagttaggcacgagcgtacatgaacaccccggggcttcccgtgtgccaggaccatcttgagttttgggagggcgtctttacgggcctcacccatatagacgcccacttcctatctcagacaaagcagagtggggaaaactttccttacctgtagcgtaccaagccaccgtgtgcgctagggctcaagcccctcccccatcgtgggaccagatgtggaagtgtttgatccgcctcaaacccaccctcaatgggccaacacccctgctatacagactggcgctgttcagaatgaaatcaccctgacgcacccaatcaccaagtacatcatgacatgtatgtcggctgac

SEQ ID NO: 682 - DNA, 4881 bp, Hepatitis C virus
aacaccaaccgtcgcccacaggacgtcaagttcccgggtggcggtcagatcgttggtggagtttacttgttgccgcgcaggggccctagattgggtgtgcgcgcgacgaggaagacttcggagcggtgcaacctcgaggtagacgtcagcctatccccaaggcgcgtcggcccgagggcaggacctgggctcagcccgggtatccttggcccctctatggcaatgagggctgcgggtgggcgggatggctcctgctccccgtggctctcggcctagctggggccccacagacccccggcgtaggtcgcgcaatttgggtaaggtcatcgatacccttacgtgcggcttcgccgacctcatggggtacataccgctcgtcggcgcccctcttggagcgctgccagggccctggcgcatggcgtccgggttctggaagacggcgtgaactatgcaacagggaaccttcctggttgctctttctctatcttccttctggccctgctctcttgcctgactgtgccccttcggcctaccaagtgcgcaactccacggggctctaccatgtcaccaatgattgccctaactcgagtattgtgtacgaggcggctgatgccatcctgcacattccggggtgtgtcccttgcgttcgcgagggtaacgcctgaggtgttgggtgtcgataacccccacggtggccaccagggacggcaaactccccacgacgcaactacgacgtcacatcgatctgcttgtcgggagcgccaccctttgttcggccctctacgtggggacctgtgcgggtctgtctttcttgtcggtcagctgctcaccttctctccgaggctccactggacgacgcagggctgcaattgttccatctatcccggccatataacgggtcaccgcatggcatgggatatgatgatgaactgtcccctacgacggcattggtagtagctcagctgctccggatcccacaagccatcttggacatgatcgctggtgctcactggggagtcctggcgggcatagcgtatttctccatggtggggaactggcgaaggtcttggtagtgctgctgctatttgccggcgttgacgcgaccacccacgtcaccgggggaagcgtcgcccgcactacgtctagttttgctaacctcctcacatcaggtgccaagcagaacatccagctgatcaacacaacggcagttggcacatcaataggacggccttgaactgcaatgatagcctcaacaccggctggatagcagggcttttctattaccacaaattcaactcttcaggctgtccccagaggttggccagtgccgacccctcaccgactttgaccagggctggggccctatcagtcatgccagcgtaaccggctccgaccaacgcccctactgctggcactaccccccaagaccttgcggtatcgtgcccgcaaagagcgtgtgtggcccggatattgcttcactcccagccccgttgttgtgggaacgaccgacagggcgggcgtgcctacctacaactggggcgcgaatgaaacggacgttttcgtccttaacaacaccaggccaccgcggggcaatggttcggttgcacctggatgaactcaactggattcaccaaagtgtgcggagcgcccccttgtgtcatcgggggggggggcaacaacaccttgtactgccctactgattgtttccgcaagcatccggaagccacatactctcgtgcggctccggtccctggcttacacccaggtgcctggtcaactacccgtataggctttggcactatccttgtaccatcaactacaccatatctaaagtcaggatgtatgtgggaggggtcgagcacggctggaagctgcctgcaactggacgcggggtgaacgttgtgatctggaagacagggacaggtccgagctcagcccgttgctgttgtctaccacacagtggcaggtccttccgtgttccttcacgaccctgccagccttatcactggcctcatccacctccatcagaacattgtggacgtgcagtacttgtacggggtggggtcaagcatcgcgtcctgggccatcaagtgggagtacgtcgttctcctgttccttctgcttgcagaccgcgcgtctgctcctgcttgtggatgatgttactcatatcccaagtggaggcggctttggagaacctcataacactcaatgcagcatccctggccgggacgcacggccttgtgtccttcctcgtgttcttctgctttgcatgtacctgaagggtaggtgggtgcccggagcggtctacgccctctacgggatgtggcctctcctcctgctcctgctggcgttgcctcaacgggcatacgcgctggacacggaggtggccgcgtcgtgtgtggcgttgtgcttgtcgggttaatggcgctgactctgtcaccatattacaagcactatatcagctggtgcttatggtggcttcagtattttctgaccagagtagaagcgcaatttcacgtgtgggttccccccctcaacgccgaggggggcgtgacgctgtcatcttactcatgtgtgttgtacacccgactctggtatttgacatcaccaaacagctgctggccgtcttcggacccctttggattctccaagccagtctgcttaagtcccctactttgtgcgcgttcagggccttctccggatctgcgcgttggcgcggaagatggtcggaggccactacgtgcaaatggccatcatcaagttgggggcgcttactggcacctatgtttataaccatctcactcccctcgggactgggcgcacaacggcctgcgagatctggccgtggctgtagagccagtcgtcttctcccggatggagaccaagctcatcacgtggggggcagacaccgccgcgtgcggtgacatcatcaacgcttgcccgtctccgcccgtaagggccgggagatactgctcgggccagctgacggaatggtctccaagggttggagattgctggcgcccatcacagcgtacgcccagcaaacaaggggcctcctagggtgtataatcaccacctgactggccgggacaaaaaccaagcggagggtgaggttcagattgtgtcaactgctacccaaactttcttggcaacgtgcatcaatggggtatgctggactgtctaccacggggccgggacgaggccatcgcatcacccaagggtcctgtcattcagatgtacaccaatgtagaccaggaccttgtgggctggcccgcccctcaaggtactcgctcactggcaccctgcacctgcggctcctcggacctttacctggtcacgaggccgccgatgtcatccccgtgcgcaggcggggtgatagcaggggcagcttgctttcgccccggcccatctcttacttgaaaggctcctcagggggtccgctgttgtgccccgcgggacacgccgtaggctattcagggccgcggtgtgcacccgcggagtggctaaggcggtggactttatccctgtggagaacctagagacaaccatgaggtccccggtgtttacggacaactcctccccaccagcagtgccccagagcttccaagtggccacctgcatgctcccacaggcagcggcaagagtaccaaggtcccggctgcatacgcagcccagggctacaaggtgctagtgctcaacccttctgtcgctgcaacactgggctttggtgcttacatgccaaggctcatggggtcgatcctaacatcaggaccggggtgagaacaattaccactggcagccccatcacgtactccacctacggcaagttccttgccgacggcgggtgctcagggggtgcttatgacataataatttgtgcgagtgccactccacggatgccacatctatcttgggcatcggcactgtccttgatcaagcagagactgcgggggcgagactggttgtgctcgccaccgctacccctccgggctccatcactgtgcccatcccaatatcgaggaggttgctctgtccaccaccggagagatccctttctacggcaaggctatccccctcgaagtgatcaagggggggagacatctcatcttctgccactcaaagaggaagtgcgacgagctcgccgcaagctggtcgcattgggcatcaatgccgtggcttactaccgcggtcttgacgtgtctgtcattccgaccagcggcgatgttgtcgtcgtggcaactgatgctctcatgaccggctataccggcgacttcactcggtgatagactgcaacacgtgtgtcacccagacagtcgatttcagccttgaccctaccttcaccattgagacaaccacgcttccccaggatgccgtctcccgcactcaacgtcggggcaggactggcagggggaagtaggcatctacagatttgtggcaccgggggagcgcccctccggtatgttcgactcgtccgtcctctgtgagtgctatgacgcgggctgtgcttggtatgagctcacgcccgccgagactacagttaggtacgagcgtacatgaacaccccggggcttcccgtgtgccaggaccatcttgagttttgggagggcgtctttacgggcctcacccatatagacgcccacttcctatctcagacaaagcagagtggggaaaactttccttaccggtagcgtaccaagccaccgtgtgcgctagggctcaagcccctcccccatcgtgggaccagatgtggaagtgtttgatccgcctcaaacccaccctcaatgggccaacacccctgctatacagactggcgctgttcagaatgaaatcaccctgacgcacccaatcaccaagtacatcatgacatgtatgtcggctgac

SEQ ID NO: 683 - DNA, 4881 bp, Hepatitis C virus
aacaccaaccgtcgcccacaggacgtcaagttcccgggtggcggtcagatcgttggtggagtttacttgttgccgcgcaggggccctagattgggtgtgcgcgcgacgaggaagacttcggagcggtgcaacctcgaggtagacgtcagcctatccccaaggcgcgtcggcccgagggcaggacctgggctcagcccgggtatccttggcccctctatggcaatgagggctgcgggtgggcgggatggctcctgctccccgtggctctcggcctagctggggccccacagacccccggcgtaggtcgcgcaatttgggtaaggtcatcgatacccttacgtgcggcttcgccgacctcatggggtacataccgctcgtcggcgcccctcttggagcgctgccagggccctggcgcatggcgtccgggttctggaagacggcgtgaactatgcaacagggaaccttcctggttgctctttctctatcttccttctggccctgctctcttgcctgactgtgccccttcggcctaccaagtgcgcaactccacggggctctaccatgtcaccaatgattgccctaactcgagtattgtgtacgaggcggctgatgccatcctgcacattccggggtgtgtcccttgcgttcgcgagggtaacgcctgaggtgttgggtgtcgataacccccacggtggccaccagggacggcaaactccccacgacgcaactacgacgtcacatcgatctgcttgtcgggagcgccaccctttgttcggccctctacgtggggacctgtgcgggtctgtctttcttgtcggtcagctgttcaccttctctccgaggctccactggacgacgcagggctgcaattgttccatctatcccggccatataacgggtcaccgcatggcatgggatatgatgatgaactgtcccctacgacggcattggtagtagctcagctgctccggatcccacaagccatcttggacatgatcgctggtgctcactggggagtcctggcgggcatagcgtatttctccatggtggggaactggcgaaggtcctggtagtgctgctgctatttgccggcgttgacgcgaccacccacgtcaccgggggaagcgtcgcccgcactacgtctagttttgctaacctcctcacatcaggtgccaagcagaacatccagctgatcaacacaacggcagttggcacatcaataggacggccttgaactgcaatgatagcctcaacaccggctggatagcagggcttttctattaccacaaattcaactcttcaggctgtccccagaggttggccagtgccgacccctcaccgactttgaccagggctggggccctatcagtcatgccagcgtaaccggctccgaccaacgcccctattgctggcactaccccccaagaccttgcggtattgtgcccgcaaagagcgtgtgtggcccggatattgcttcactcccagccccgttgttgtgggaacgaccgacagggcgggcgtgcctacctacaactggggcgcgaatgaaacggacgttttcgtccttaacaacaccaggccaccgcggggcaatggttcggttgcacctggatgaactcaactggattcaccaaagtgtgcggagcgcccccttgtgtcatcgggggggggggcaacaacaccttgtactgccctactgattgtttccgcaagcatccggaagccacatactctcgtgcggctccggtccctggcttacacccaggtgcctggtcaactacccgtataggctttggcactatccttgtaccatcaactacaccatatctaaagtcaggatgtatgtgggaggggtcgagcacggctggaagctgcctgcaactggacgcggggtgaacgttgtgatctggaagacagggacaggtccgagctcagcccgttgctgttgtctaccacacagtggcaggtccttccgtgttccttcacgaccctgccagccttatcactggcctcatccacctccatcagaacattgtggacgtgcagtacttgtacggggtggggtcaagcattgcgtcctgggccatcaagtgggagtacgtcgttctcctgttccttctgcttgcagaccgcgcgtctgctcctgcttgtggatgatgttactcatatcccaagtggaggcggctttggagaacctcataacactcaatgcagcatccctggccgggacgcacggccttgtgtccttcctcgtgttcttctgctttgcatgtacctgaagggtaggtgggtgcccggagcggtctacgccctctacgggatgtggcctctcctcctgctcctgctggcgttgcctcaacgggcatacgcgctggacacggaggtggccgcgtcgtgtgcggcgttgtgcttgtcgggttaatggcgctgactctgtcaccatattacaagcactatatcagctggtgcttatggtggcttcagtactttctgaccagagtagaagcgcaatttcacgtgtgggttccccccctcaacgccgaggggggcgtgacgctgtcatcttgctcatgtgtgttgtacacccgactctggtatttgacatcaccaaacagctgctggccgtcttcggacccctttggattctccaagccagtctgcttaagtcccctacttcgtgcgcgttcagggccttctccggatctgcgcgttggcgcggaagatggtcggaggccactacgtgcaaatggccatcatcaagttgggggcgcttactggcacctatgtttataaccatctcactcccctcgggactgggcgcacaacggcctgcgagatctggccgtggctgtagagccagtcgtcttctcccggatggagaccaagctcatcacgtggggggcagacaccgccgcgtgcggtgacatcatcaacgcttgcccgtctccgcccgtaagggccgggagatactgctcgggccagctgacggaatggtctccaagggttggagattgctggcgcccatcacagcgtacgcccagcaaacaaggggcctcctagggtgtataatcaccacctgactggccgggacaaaaaccaagcggagggtgaggtccagattgtgtcaactgctacccaaactttcttggcaacgtgcatcaatggggtatgctggactgtctaccacggggccgggacgaggccatcgcatcacccaagggtcctgtcattcagatgtacaccaatgtagaccaggaccttgtgggctggcccgcccctcaaggtacccgctcattggcaccctgcacctgcggctcctcggacctttacctggtcacgaggccgccgatgtcatccccgtgcgcaggcggggtgatagcaggggcagcttgctttcgccccggcccatctcttacttgaaaggctcctcagggggtccgctgttgtgccccgcgggacacgccgtaggctattcagggccgcggtgtgcacccgtggagtggctaaggcggtggactttatccctgtggagaacctagagacaaccatgaggtccccggtgtttacggacaactcctccccaccagcagtgccccagagcttccaagtggccacctgcatgctcccacaggcagcggcaagagcaccaaggtcccggctgcatacgcagcccagggctacaaggtgctagtgctcaacccttctgtcgctgcaacactgggctttggtgcttacatgccaaagctcatggggtcgatcctaacatcaggaccggggtgagaacaattaccactggcagccccatcacgtactccacctacggcaagttccttgccgacggcgggtgctcagggggtgcttatgacataataatttgtgcgagtgccactccacggatgccacatctatcttgggcatcggcactgtccttgatcaagcagagactgcgggggcgagactggttgtgctcgccaccgctacccctccgggctccatcactgtgcccatcccaatatcgaggaggttgctctgtccaccaccggagagatccctttctacggcaaggctatccccctcgaagtgatcaagggggggagacatctcatcttctgccactcaaagaggaagtgcgacgagctcgccgcaagctggtcgcattgggcatcaatgccgtggcttactaccgcggtcttgacgtgtctgtcattccgaccagcggcgatgttgtcgtcgtggcaactgatgctctcatgaccggctataccggcgacttcactcggtgatagactgcaacacgtgtgtcacccagacagtcgatttcagccttgaccctaccttcaccattgagacaaccacgcttccccaggatgccgtctcccgcactcaacgtcggggcaggactggcagggggaagtaggcatctacagatttgtggcaccgggggagcgcccctccggtatgttcgactcgtccgtcctctgtgagtgctatgacgcgggctgtgcttggtatgagctcacgcccgccgagactacagttaggtacgagcgtacatgaacaccccggggcttcccgtgtgccaggaccatcttgagttttgggagggcgtctttacgggcctcacccatatagacgcccacttcctatctcagacaaagcagagtggggaaaactttccttaccggtagcgtaccaagccaccgtgtgcgctagggctcaagcccctcccccatcgtgggaccagatgtggaagtgtttgatccgcctcaaacccaccctcaatgggccaacacccctgctatacagactggcgctgttcagaatgaaatcaccctgacgcacccaatcaccaagtacatcatgacatgtatgtcggctgac

SEQ ID NO: 684 - DNA, 4881 bp, Hepatitis C virus
aacaccaaccgtcgcccacaggacgtcaagttcccgggtggcggtcagatcgttggtggagtttacttgttgccgcgcaggggccctagattgggtgtgcgcgcgacgaggaagacttccgagcggtgcaacctcgaggtagacgtcagcctatccccaaggcgcgtcggcccgagggcaggacctgggctcagcccgggtatccttggcccctctatggcaatgagggctgcgggtgggcgggatggctcctgctccccgtggctctcggcctagctggggccccacagacccccggcgtaggtcgcgcaatttgggtaaggtcatcgatacccttacgtgcggcttcgccgacctcatggggtacataccgctcgtcggcgcccctcttggagcgctgccagggccctggcgcatggcgtccgggttctggaagacggcgtgaactatgcaacagggaaccttcctggttgctctttctctatcttccttctggccctgctctcttgcctgactgtgccccttcggcctaccaagtgcgcaactccacggggctctaccatgtcaccaatgattgccctaactcgagtattgtgtacgaggcggctgatgccatcctgcacattccggggtgtgtcccttgcgttcgcgagggtaacgcctgaggtgttgggtgtcgataacccccacggtggccaccagggacggcaaactccccacgacgcaactacgacgtcacatcgatctgcttgtcgggagcgccaccctttgttcggccctctacgtggggacctgtgcgggtctgtctttcttgtcggtcagctgttcaccttctctccgaggctccactggacgacgcaaggctgcaattgttccatctatcccggccatataacgggtcaccgcatggcatgggatatgatgatgaactgtcccctacgacggcattggtagtagctcagctgctccggatcccacaagccatcttggacatgatcgctggtgctcactggggagtcctggcgggcatagcgtatttctccatggtggggaactggcgaaggtcctggtagtgctgctgctatttgccggcgttgacgcgaccacccacgtcaccgggggaagcgtcgcccgcactacgtctagttttgctaacctcctcacatcaggtgccaagcagaacatccagctgatcaacacaacggcagttggcacatcaataggacggccttgaactgcaatgatagcctcaacaccggctggatagcagggcttttctattaccacaaattcaactcttcaggctgtccccagaggttggccagtgccgacccctcaccgactttgaccagggctggggccctatcagtcatgccagcgtaaccggctccgaccaacgcccctactgctggcactaccccccaagaccttgcggtattgtgcccgcaaagagcgtgtgtggcccggatattgcttcactcctagccccgttgttgtgggaacgaccgacagggcgggcgtgcctacctacaactggggcgcgaatgaaacggacgttttcgtccttaacaacaccaggccaccgcggggcaatggttcggttgcacctggatgaactcaactggattcaccaaagtgtgcggagcgcccccttgtgtcatcgggggggggggcaacaacaccttgtactgccctactgattgtttccgcaagcatccggaagccacatactctcgtgcggctccggtccctggcttacacccaggtgcctggtcaactacccgtataggctttggcactatccttgtaccatcaactacaccatatctaaagtcaggatgtatgtgggaggggtcgagcacggctggaagctgcctgcaactggacgcggggtgaacgttgtgatctggaagacagggacaggtccgagctcagcccgttgctgttgtctaccacacagtggcaggtccttccgtgttccttcacgaccctgccagccttatcactggcctcatccacctccatcagaacattgtggacgtgcagtacttgtacggggtggggtcaagcatcgcgtcctgggccatcaagtgggagtacgtcgttctcctgttccttctgcttgcagaccgcgcgtctgctcctgcttgtggatgatgttactcatatcccaagtggaggcggctttggagaacctcataacactcaatgcagcatccctggccgggacgcacggccttgtgtccttcctcgtgttcttctgctttgcatgtacctgaagggtaggtgggtgcccggagcggtctacgccctctacgggatgtggcctctcctcctgctcctgctggcgttgcctcaacgggcatacgcgctggacacggaggtggccgcgtcgtgtgcggcgttgtgcttgtcgggttaatggcgctgactctgtcaccatattacaagcactatatcagctggtgcttatggtggcttcagtattttctgaccagagtagaagcgcaatttcacgtgtgggttccccccctcaacgccgaggggggcgtgacgctgtcatcttactcatgtgtgtcgtacacccgactctggtatttgacatcaccaaacagctgctggccgtcttcggacccctttggattctccaagccagtctgcttaagtcccctacttcgtgcgcgttcagggccttctccggatctgcgcgttagcgcggaagatggtcggaggccactacgtgcaaatggccatcatcaagttgggggcgcttactggcacctatgtttataaccatctcactcccctcgggactgggcgcacaacggcctgcgagatctggccgtggctgtagagccagtcgtcttctcccggatggagaccaagctcatcacgtggggggcagacaccgccgcgtgcggtgacatcatcaacgcttgcccgtctccgcccggaagggccgggagatactgctcgggccagctgacggaatggtctccaagggttggagattgctggcgcccatcacagcgtacgcccagcaaacaaggggcctcctagggtgtataatcaccacctgactggccgggacaaaaaccaagcggagggtgaggtccagattgtgtcaactgctacccaaactttcttggcaacgtgcatcaatggggtatgctggactgtctaccacggggccgggacgaggccatcgcatcacccaagggtcctgtcattcagatgtacaccaatgtagaccaggaccttgtgggctggcccgcccctcaaggtacccgctcattggcaccctgcacctgcggctcctcggacctttacctggtcacgaggccgccgatgtcatccccgtgcgcaggcggggtgatagcaggggcagcttgctttcgccccggcccatctcttacttgaaaggctcctcagggggtccgctgttgtgccccgcgggacacgccgtaggctattcagggccgcggtgtgcacccgtggagtggctaaggcggtggactttatccctgtggagaacctagagacaaccatgaggtccccggtgtttacggacaactcctccccaccagcagtgccccagagcttccaagtggccacctgcatgctcccacaggcagcggcaagagcaccaaggtcccggctgcatacgcagcccagggctacaaggtgctagtgctcaacccttctgtcgctgcaacactgggctttggtgcttacatgccaaggctcatggggtcgatcctaacatcaggaccggggtgagaacaattaccactggcagccccatcacgtactccacctacggcaagttccttgccgacggcgggtgctcagggggtgcttatgacataataatttgtgcgagtgccactccacggatgccacatctatcttgggcatcggcactgtccttgatcaagcagagactgcgggggcgagactggttgtgctcgccaccgctacccctccgggctccatcactgtgcccatcccaatatcgaggaggttgctctgtccaccaccggagagatccctttctacggcaaggctatccccctcgaagtgatcaagggggggagacatctcatcttctgccactcaaagaggaagtgcgacgagctcgccgcaagctggtcgcgttgggcatcaatgccgtggcttactaccgcggtcttgacgtgtctgtcattccgaccagcggcgatgttgtcgtcgtggcaactgatgctctcatgaccggctataccggcgatttcactcggtgatagactgcaacacgtgtgtcacccagacagtcgatttcagccttgaccctaccttcaccattgagacaaccacgcttccccaggatgccgtctcccgcactcaacgtcggggcaggactggcagggggaagtaggcatctacagatttgtggcaccgggggagcgcccctccggtatgttcgactcgtccgtcctctgtgagtgctatgacgcgggctgtgcttggtatgagctcacgcccgccgagactacagttaggtacgagcgtacatgaacaccccggggcttcccgtgtgccaggaccatcttgagttttgggagggcgtctttacgggcctcacccatatagatgcccacttcctatctcagacaaagcagagtggggaaaactttccttaccggtagcgtaccaagccaccgtgtgcgctagggctcaagcccctcccccatcgtgggaccagatgtggaagtgtttgatccgcctcaagcccaccctcaatgggccaacacccctgctatacagactggcgctgttcagaatgaggtcaccctgacgcacccaatcaccaaatacatcatgacatgtatgtcggctgac

SEQ ID NO: 685 - DNA, 4881 bp, Hepatitis C virus
aacaccaaccgtcgcccacaggacgtcaagttcccgggtggcggtcagatcgttggtggagtttacttgttgccgcgcaggggccctagattgggtgtgcgcgcgacgaggaagacttccgagcggtgcaacctcgaggtagacgtcagcctatccccaaggcgcgtcggcccgagggtaggacctgggctcagcccgggtatccttggcccctctatggcaatgagggctgcgggtgggcgggatggctcctgctccccgtggctctcggcctagctggggccccacagacccccggcgtaggtcgcgcaatttgggtaaggtcatcgatacccttacgtgcggcttcgccgacctcatggggtacataccgctcgtcggcgcccctcttggagcgctgccagggccctggcgcatggcgtccgggttctggaagacggcgtgaactatgcaacagggaaccttcctggttgctctttctctatcttccttctggccctgctctcttgcctgaccgtgccccttcggcctaccaagtgcgcaactccacggggctctaccatgtcaccaatgattgccctaactcgagtattgtgtacgaggcggctgatgccatcctgcacattccggggtgtgtcccttgcgttcgcgagggtaacgcctgaggtgttgggtgtcgataacccccacggtggccaccagggacggcaaactccccacgacgcaactacgacgtcacatcgatctgcttgtcgggagcgccaccctttgttcggccctctacgtggggacctgtgcgggtctgtctttcttgtcggtcagctgttcaccttctctccgaggctccactggacgatgcagggctgcaattgttccatctatcccggccatataacgggtcaccgcatggcatgggatatgatgatgaactgtcccctacgacggcattggtagtagctcagctgctccggatcccacaagccatcttggacatgatcgctggtgcccactggggagtcctggcgggcatagcgtatttctccatggtggggaactggcgaaggtcctggtagtgctgctgctatttgccggcgttgacgcgaccacccacgtcaccgggggaagcgtcgcccgcactacgtctagttttgctaacctcctcacatcaggtgccaagcagaacatccagctgatcaacacaacggcagttggcacatcaataggacggccttgaactgcaatgatagcctcaacaccggctggatagcagggcttttctattaccacaaattcaactcttcaggctgtccccagaggttggccagtgccgacccctcaccgactttgaccagggctggggccctatcagtcatgccagcgtaaccggctctgaccaacgcccctactgctggcactaccccccaagaccttgcggtattgtgcccgcaaagagcgtgtgtggcccggatattgcttcactcctagccccgttgttgtgggaacgaccgacagggcgggcgtgcctacctacaactggggcgcgaatgaaacggacgttttcgtccttaacaacaccaggccaccgcggggcaatggttcggttgcacctggatgaactcaactggattcaccaaagtgtgcggagcgcccccttgtgtcatcgggggggggggcaacaacaccttgtactgccctactgattgtttccgcaagcatccggaagccacatactctcgtgcggctccggtccctggcttacacccaggtgcctggtcaactacccgtataggctttggcactatccttgtaccatcaactacaccatatctaaagtcaggatgtatgtgggaggggtcgagcacggctggaagctgcctgcaactggacgcggggtgaacgttgtgatctggaagacagggacaggtccgagctcagcccgttgctgttgtctaccacacagtggcaggtccttccgtgttccttcacgaccctgccagccttatcactggcctcatccacctccatcagaacattgtggacgtgcagtacttgtacggggtggggtcaagcatcgcgtcctgggccatcaagtgggagtacgtcgttctcctgttccttctgcttgcagaccgcgcgtctgctcctgcttgtggatgatgttactcatatcccaagtggaggcggctttggagaacctcataacactcaatgcagcatccctggccgggacgcacggccttgtgtccttcctcgtgttcttctgctttgcatgtacctgaagggtaggtgggtgcccggagcggtctacgccctctacgggatgtggcctctcctcctgctcctgctggcgttgcctcaacgggcatacgcgctggacacggaggtggccgcgtcgtgtgcggcgttgtgcttgtcgggttaatggcgctgactctgtcaccatattacaagcactatatcagctggtgcttatggtggcttcagtattttctgaccagagtagaagcgcaatttcacgtgtgggttccccccctcaacgccgaggggggcgtgacgctgtcatcttactcatgtgtgtcgtacacccgactctggtatttgacatcaccaaacagctgctggccgtcttcggacccctttggattctccaagccagtctgcttaagtcccctacttcgtgcgcgttcagggccttctccggatctgcgcgttagcgcggaagatggtcggaggccactacgtgcaaatggccatcatcaagttgggggcgcttactggcacctatgtttataaccatctcactcccctcgggactgggcgcacaacggcctgcgagatctggccgtggctgtagagccagtcgtcttctcccggatggagaccaagctcatcacgtggggggcagacaccgccgcgtgcggtgacatcatcaacgcttgcccgtctccgcccgtaagggccgggagatactgctcgggccagctgacggaatggtctccaagggttggagattgctggcgcccatcacagcgtacgcccagcaaacaaggggcctcctagggtgtatagtcaccacctgactggccgggacaaaaaccaagcggagggtgaggtccagattgtgtcaactgctacccaaactttcttggcaacgtgcatcaatggggtatgctggactgtctaccacggggccgggacgaggccatcgcatcacccaagggtcctgtcattcagatgtacaccaatgtagaccaggaccttgtgggctggcccgcccctcaaggtacccgctcattggcaccctgcacctgcggctcctcggacctttacctggtcacgaggctgccgatgtcatccccgtgcgcaggcggggtgatagcaggggcagcttgctttcgccccggcccatctcttacttgaaaggctcctcagggggtccgctgttgtgccccgcgggacacgccgtaggctattcagggccgcggtgtgcacccgtggagtggctaaggcggtggactttatccctgtggagaacctagagacaaccatgaggtccccggtgtttacggacaactcctccccaccagcagtgccccagagcttccaagtggccacctgcatgctcccacaggtagcggcaagagcaccaaggtcccggctgcatacgcagcccagggctacaaggtgctagtgctcaacccttctgtcgctgcaacactgggctttggtgcttacatgccaaggctcatggggtcgatcctaacatcaggaccggggtgagaacaattaccactggcagccccatcacgtactccacctacggcaagttccttgccgacggcgggtgctcagggggtgcttatgacataataatttgtgcgagtgccactccacggatgccacatctatcttgggcatcggcactgtccttgatcaagcagagactgcgggggcgagactggttgtgctcgccaccgctacccctccgggctccatcactgtgcccatcccaatatcgaggaggttgctctgtccaccaccggagagatccctttctacggcaaggctatccccctcgaagtgatcaagggggggagacatctcatcttctgccattcaaagaggaagtgcgacgagctcgccgcaagctggtcgcattgggcatcaatgccgtggcttactaccgcggtcttgacgtgtctgtcattccgaccagcggcgatgttgtcgtcgtggcaactgatgctctcatgaccggctataccggcgacttcactcggtgatagactgcaacacgtgtgtcacccagacagtcgatttcagccttgaccctaccttcaccattgagacaaccacgcttccccaggatgccgtctcccgcactcaacgtcggggcaggactggcagggggaagtaggcatctacagatttgtggcaccgggggagcgcccctccggtatgttcgactcgtccgtcctctgtgagtgctatgacgcgggctgtgcttggtatgagctcatgcccgccgagactacagttaggtacgagcgtacatgaacaccccggggcttcccgtgtgccaggaccatcttgagttttgggagggcgtctttacgggcctcacccatatagatgcccacttcctatctcagacaaagcagagtggggaaaactttccttatcggtagcgtaccaagccaccgtgtgcgctagggctcaagcccctcccccgtcgtgggaccagatgtggaagtgtttggtccgcctcaaacccaccctccatgggccaacacccctgctatacagactggcgctgttcagaatgaaatcaccctgacgcacccaatcaccaagtacatcatgacatgtatgtcggctgac

SEQ ID NO: 686 - DNA, 4881 bp, Hepatitis C virus
aacaccaaccgtcgcccacaggacgtcaagttcccgggtggcggtcagatcgttggtggagtttacttgttgccgcgcaggggccctagattgggtgtgcgcgcgacgaggaagacttcggagcggtgcaacctcgaggtagacgtcagcctatccccaaggcgcgtcggcccgagggcaggacctgggctcagcccgggtatccttggcccctctatggcaatgagggctgcgggtgggcgggatggctcctgctccccgtggctctcggcctagctggggccccacagacccccggcgtaggtcgcgcaatttgggtaaggtcatcgatacccttacgtgcggcttcgccgacctcatggggtacataccgctcgtcggcgcccctcttggagcgctgccagggccctggcgcatggcgtccgggttctggaagacggcgtgaactatgcaacagggaaccttcctggttgctctttctctatcttccttctggccctgctctcttgcctgactgtgccccttcggcctaccaagtgcgcaactccacggggctctaccatgtcaccaatgattgccctaactcgagtattgtgtacgaggcggctgatgccatcctgcacattccggggtgtgtcccttgcgttcgcgagggtaacgcctgaggtgttgggtgtcgataacccccacggtggccaccagggacggcaaactccccacgacgcaactacgacgtcacatcgatctgcttgtcgggagcgccaccctttgttcggccctctacgtggggacctgtgcgggtctgtctttcttgtcggtcagctgttcaccttctctccgaggctccactggacgacgcagggctgcaattgttccatctatcccggccatataacgggtcaccgcatggcatgggatatgatgatgaactgtcccctacgacggcattggtagtagctcagctgctccggatcccacaagccatcttggacatgatcgctggtgctcactggggagtcctggcgggcatagcgtatttctccatggtggggaactggcgaaggttctggtagtgctgctgctatttgccggcgttgacgcgaccacccacgtcaccgggggaagcgtcgcccgcactacgtctagttttgctaacctcctcacatcaggtgccaagcagaacatccagctgatcaacacaacggcagttggcacatcaataggacggccttgaactgcaatgatagcctcaacaccggctggatagcagggcttttctattaccacaaattcaactcttcaggctgtccccagaggttggccagtgccgacccctcaccgactttgaccagggctggggccctatcagtcatgccagcgtaaccggctccgaccaacgcccctactgctggcactaccccccaagaccttgcggtattgtgcccgcaaagagcgtgtgtggcccggatattgcttcactcccagccccgttgttgtgggaacgaccgacagggcgggcgtgcctacctacaactggggcgcgaatgaaacggacgttttcgtccttaacaacaccaggccaccgcggggcaatggttcggttgcacctggatgaactcaactggattcaccaaagtgtgcggagcgcccccttgtgtcatcgggggggggggcaacaacaccttgtactgccctactgattgtttccgcaagcatccggaagccacatactctcgtgcggctccggtccctggcttacacccaggtgcctggtcaactacccgtataggctttggcactatccttgtaccatcaactacaccatatctaaagtcaggatgtatgtgggaggggtcgagcacggctggaagctgcctgcaactggacgcggggtgaccgttgtgatctggaagacagggacaggtccgagctcagcccgttgctgttgtctaccacacagtggcaggtccttccgtgttccttcacgaccctgccagccttattactggcctcatccacctccatcagaacatcgtggacgtgcagtacttgtacggggtggggtcaagcatcgcgtcctgggccatcaagtgggagtacgtcgttctcctgttccttctgcttgcagaccgcgcgtctgctcctgcttgtggatgatgttactcatatcccaagtggaggcggctttggagaacctcataacactcaatgcagcatccctggccgggacgcacggccttgtgtccttcctcgtgttcttctgctttgcatgtacctgaagggtaggtgggtgcccggagcggtctacgccctctacgggatgtggcctctcctcctgctcctgctggcgttgcctcaacgggcatacgcgctggacacggaggtggccgcgtcgtgtgcggcgttgtgcttgtcgggttaatggcgctgactctgtcaccatattacaagcactatatcagctggtgcttatggtggcttcagtattttctgaccagagtagaagcgcaatttcacgtgtgggttccccccctcaacgccgaggggggcgtgacgctgtcatcttactcacgtgtgttgtacacccggctctggtatttgacatcaccaaacagctgctggccgtcttcggacccctttggattctccaagccagtctgcttaagtcccctacttcgtgcgcgttcagggccttctccggatctgcgcgttagcgcggaagatggtcggaggccactacgtgcaaatggccatcatcaagttgggggcgcttactggcacctatgtttataaccatctcactcccctcgggactgggcgcacaacggcctgcgagatctggccgtggctgtagagccagtcgtcttctcccggatggagaccaagctcatcacgtggggggcagacaccgccgcgtgcggtgacatcatcaacgcttgcccgtctccgcccgtaagggccgggagatactgctcgggccagctgacggaatggtctccaagggttggagattgctggcgcccatcacagcgtacgcccagcaaacaaggggcctcctagggtgtataatcaccacctgactggccgggacaaaaaccaagcggagggtgaggtccagattgtgtcaactgctacccaaactttcttggcaacgtgcatcaatggggtatgctggactgtctaccacggggccgggacgaggccatcgcatcacccaagggtcctgtcattcagatgtacaccaatgtagaccaggaccttgtgggctggcccgcccctcaaggtacccgctcattggcaccctgcacctgcggctcctcggacctttacctggtcacgaggccgccgatgtcatccccgtgcgcaggcggggtgatagcaggggcagcttgctttcgccccggcccatctcttacttgaaaggctcctcagggggtccgctgttgtgccccgcgggacacgccgtaggctattcagggccgcggtgtgcacccgtggagtggctaaggcggtggactttatccctgtggagaacctagagacaaccatgaggtccccggtgtttacggacaactcctccccaccagcagtgccccagagcttccaagtggccacctgcatgctcccacaggcagcggcaagagcaccaaggtcccggctgcatacgcagcccagggctacaaagtgctagtgctcaacccttctgtcgctgcaacactgggctttggtgcttacatgccaaggctcatggggtcgatcctaacatcaggaccggggtgagaacaattaccactggcagccccatcacgtactccacctacggcaagttccttgccgacggcgggtgctcagggggtgcttatgacataataatttgtgcgagtgccactccacggatgccacatctatcttgggcatcggcactgtccttgatcaagcagagactgcgggggcgagactggttgtgctcgccaccgctacccctccgggctccatcactgtgcccatcccaatatcgaggaggttgctctgtccaccaccggagagatccctttctacggcaaggctatccccctcgaagtgatcaagggggggagacatctcatcttctgccactcaaagaggaagtgcgacgagctcgccgcaagctggtcgcattgggcatcaatgccgtggcttactaccgcggtcttgacgtgtctgtcattccgaccagcggcgatgttgtcgtcgtggcaactgatgctctcatgaccggctataccggcgacttcactcggtgatagactgcaacacgtgtgtcacccagacagtcgatttcagccttgaccctaccttcaccattgagacaaccacgcttccccaggatgccgtctcccgcactcaacgtcggggcaggactggcagggggaagtaggcatctacagatttgtggcaccgggggagcgcccctccggtatgttcgactcgtccgtcctctgtgagtgctatgacgcgggctgtgcttggtatgagctcacgcccgccgagactacagttaggtacgagcgtacatgaacaccccggggcttcccgtgtgccaggaccatcttgagttttgggagggcgtctttacgggcctcacccatatagacgcccacttcctatctcagacaaagcagagtggggaaaactttccttaccggtagcgtaccaagccaccgtgtgcgctagggctcaagcccctcccccatcgtgggaccagatgtggaagtgtttgatccgcctcaaacccaccctcaatgggccaacacccctgctatacagactggcgctgttcagaatgaaatcaccctgacgcacccaatcaccaagtacatcatgacatgtatgtcggctgac

SEQ ID NO: 687 - DNA, 4881 bp, Hepatitis C virus
aacaccaaccgtcgcccacaggacgtcaagttcccgggtggcggtcagatcgttggtggagtttacttgttgccgcgcaggggccctagattgggtgtgcgcgcgacgaggaagacttcggagcggtgcaacctcgaggtagacgtcagcctatccccaaggcgcgtcggcccgagggcaggacctgggctcagcccgggtatccttggcccctctatggcaatgagggctgcgggtgggcgggatggctcctgctccccgtggctctcggcctagctggggccccacagacccccggcgtaggtcgcgcaatttgggtaaggtcatcgatacccttacgtgcggcttcgccgacctcatggggtacataccgctcgtcggcgcccctcttggagcgctgccagggccctggcgcatggcgtccgggttctggaagacggcgtgaactatgcaacagggaaccttcctggttgctctttctctatcttccttctggctctgctctcttgcctgactgtgccccttcggcctaccaagtgcgcaactccacggggctctaccatgtcaccaatgattgccctaactcgagtattgtgtacgaggcggctgatgccatcctgcacattccggggtgtgtcccttgcgttcgcgagggtaacgcctgaggtgttgggtgtcgataacccccacggtggccaccagggacggcaaactccccacgacgcaactacgacgtcacatcgatctgcttgtcgggagcgccaccctttgttcggccctctacgtggggacctgtgcgggtctgtctttcttgtcggtcagctgttcaccttctctccgaggctccactggacgacgcagggctgcaattgttccatctatcccggccatataacgggtcaccgcatggcatgggatatgatgatgaactgtcccctacgacggcattggtagtagctcagctgctccggatcccacaagccatcttggacatgatcgctggtgctcactggggagtcctggcgggcatagcgtatttctccatggtggggaactggcgaaggtcctggtagtgctgctgctatttgccggcgttgacgcgaccacccacgtcaccgggggaagcgccgcccgcactacgtctagttttgctaacctcctcacatcaggtgccaagcagaacatccagctgatcaacacaacggcagttggcacatcaataggacggccttgaactgcaatgatagcctcaacaccggctggatagcagggcttttctattaccacaaattcaactcttcaggctgtccccagaggttggccagtgccgacccctcaccgactttgaccagggctggggccctatcagtcatgccagcgtaaccggctccgaccaacgcccctactgctggcactaccccccaagaccttgcggtattgtgcccgcaaagagcgtgtgtggcccggatattgcttcactcccagccccgttgttgtgggaacgaccgacagggcgggcgtgcctacctacaactggggcgcgaatgaaacggacgttttcgtccttaacaacaccaggccaccgcggggcaatggttcggttgcacctggatgaactcaactggattcaccaaagtgtgcggagcgcccccttgtgtcatcgggggggggggcaacaacaccttgtactgccctactgattgtttccgcaagcatccggaagccacatactctcgtgcggctccggtccctggcttacacccaggtgcctggtcaactacccgtataggctttggcactatccttgtaccatcaactacaccatatctaaagttaggatgtatgtgggaggggtcgagcacggctggaagctgcctgcaactggacgcggggtgaacgttgtgatctggaagacagggacaggtccgagctcagcccgttgctgttgtctaccacacagtggcaggtccttccgtgttccttcacgaccctgccagccttatcactggcctcatccacctccatcagaacattgtggacgtgcagtacttgtacggggtggggtcaagcatcgcgtcctgggccatcaagtgggagtacgtcgttctcctgttccttctgcttgcagaccgcgcgtctgctcctgcttgtggatgatgttactcatatcccaagtggaggcggctttggagaacctcataacactcaatgcagcatccctggccgggacgcacggccttgtgtccttcctcgtgttcttctgctttgcatgtacctgaagggtaggtgggtgcccggagcggtctacgccctctacgggatgtggcctctcctcctgctcctgctggcgttgcctcaacgggcatacgcgctggacacggaggtggccgcgtcgtgtgcggcgttgtgcttgtcgggttaatggcgctgactctgtcaccatattacaagcactatatcagctggtgcttatggtggcttcagtattttctgaccagagtagaagcgcaatttcacgtgtgggttccccccctcaacgccgaggggggcgtgacgctgtcatcttactcatgtgtgttgtacacccgactctggtatttgacatcaccaaacagctgctggccgtcttcggacccctttggattctccaagccagtctgcttaagtcccctacttcgtgcgcgttcagggccttctccggatctgcgcgttagcgcggaagatggtcggaggccactacgtgcaaatggccatcatcaagttgggggcgcttactggcacctatgtttataaccatctcactcccctcgggactgggcgcacaacggcctgcgagatctggccgtggctgtagagccagtcgtcttctcccggatggagaccaagctcatcacgtggggggcagacaccgccgcgtgcggtgacatcatcaacgcttgcccgtctccgcccgtaagggccgggagatactgctcgggccagctgacggaatggtctccaagggttggagattgctggcgcccatcacagcgtacgcccagcaaacaaggggcctcctagggtgtataatcaccacctgactggccgggacaaaaaccaagcggagggtgaggtccagattgtgtcaactgctacccaaactttcttggcaacgtgcatcaatggggtatgctggactgtctaccacggggccgggacgaggccatcgcatcacccaagggtcctgtcattcagatgtacaccaatgtagaccaggaccttgtgggctggcccgcccctcaaggtacccgctcattggcaccctgcacctgcggctcctcggacctttacctggtcacgaggccgccgatgtcatccccgtgcgcaggcggggtgatagcaggggcagcttgctttcgccccggcccatctcttacttgaaaggctcctcagggggtccgctgttgtgccccgcgggacacgccgtaggctattcagggccgcggtgtgcacccgtggagtggctaaggcggtggactttatccctgtggagaacctagagacgaccatgaggtccccggtgtttacggacaactcctccccaccagcagtgccccagagtttccaagtggccacctgcatgctcccacaggcagcggcaagagcaccaaggtcccggctgcatacgcagcccagggctacaaggtgctagtgctcaacccttctgtcgctgcaacactgggctttggtgcttacatgccaaggctcatggggtcgatcctaacatcaggaccggggtgagaacaattaccactggcagccccatcacgtactccacctacggcaagttccttgccgacggcgggtgctcagggggtgcttatgacataataatttgtgcgagtgccactccacggatgccacatctatcttgggcatcggcactgtccttgatcaagcagagactgcgggggcgagactggttgtgctcgccaccgctacccctccgggctccatcactgtgcccatcccaatatcgaggaggttgctctgtccaccaccggagagatccctttctacgggaaggctatccccctcgaagtgatcaagggggggagacatctcatcttctgccactcaaagaggaagtgcgacgagctcgccgcaagctggtcgcgttgggcatcaatgccgtggcttactaccgcggtcttgacgtgtctgtcattccgaccagcggcgatgttgtcgtcgtggcaactgatgctctcatgaccggctataccggcgacttcactcggtgatagactgcaacacgtgtgtcacccagacagtcgatttcagccttgaccctaccttcaccattgagacaaccacgcttccccaggatgccgtctcccgcactcaacgtcggggcaggactggcagggggaagtaggcatctacagatttgtggcaccgggggagcgcccctccggtatgttcgactcgtccgtcctctgtgagtgctatgacgcgggctgtgcttggtatgagctcacgcccgccgagactacagttaggtacgagcgtacatgaacaccccggggcttcccgtgtgccaggaccatcttgagttttgggagggcgtctttacgggcctcacccatatagacgcccacttcctatctcagacaaagcagagtggggaaaactttccttaccggtagcgtaccaagccaccgtgtgcgctagggctcaagcccctcccccatcgtgggaccagatgtggaagtgtttgatccgcctcaaacccaccctcaatgggccaacacccctgctatacagactggcgctgttcagaatgaaatcaccctgacgcacccaatcaccaagtacatcatgacatgtatgtcggccgac

SEQ ID NO: 688 - DNA, 4869 bp, Hepatitis C virus
ccgcccacaggacgtcaagttcccgggtggcggtcagatcgttggtggagtttacttgttgccgcgcaggggccctagattgggtgtgcgcgcgacgaggaagacttccgagcggtcgcaacctcgagtagacgtcagcctatccccaaggctcgtcggcccgagggcaggacctgggctcagcccgggtacccttggcccctctatggcaatgagggttgcggttgggcgggatggctcctgtctccccgcggtctcggcctagctggggccccacggacccccggcgtaggtcgcgcaatttgggtaaggtcatcgatacccttacgtgtggcttcgccgatctcatggggtacataccgctcgtcggcgcccctcttggaggcgctgccaggccctggcgcacggcgtccgggttctggaagacggcgtgaattatgcaacagggaatcttcctggttgctctttctctatcttccttctggccctgctctcttgcttgactgtgcccgcttcagcctacaagtgcgcaactcctcagggctttaccatgtcaccaatgattgccctaactcgagtattgtgtacgaggcgggtgatgccatcctgcacactccggggtgtgtcccttgcgttcgcgagggtaacacctcgaggtgttggtggcggtgacccccacggtggccaccagggacggcaaactccccacaacgcagcttcggcgccacatcgatctgcttgtcgggagcgccaccctttgctcggccctctacgtgggggacctgtgcggtctgtctttcttgtcggccaactgttcaccttttctcccaggcgccactggacaacgcaagattgcaattgttctatgtatcccggccatataacgggtcaccgcatggcatgggatatgatgatgaactggtcccctacgcggcgttggtggtagctcagctgctccggatcccacaagccatcatggacatgatcgctggtgctcactggggagtcctggcgggcatagcgtatttctccatggtggggaactgggcgaaggtcctgtagtgctgctgctatttgccggcgttgacgcggaaacccacgtcaccgggggaagtgccggccataccgtgtctgggttcgctgggctcttcacaacgggacccaagcagaatatccaactgatcaacaccaacggcagtggcacatcaatagcacggccttgaactgcaatgataccctcaacaccggctggatagcagggctcctctatcaccacaaattcaactcttcgggctgttccgagaggttggccagctgccggcgcctaccgatttttctcagggctggggccccatcagttatgccaacggaagcgggcccgaccaacggccctactgctggcactaccccccaaagccttgtactattgtgcccgcaaagaacgtgtgtggcccagtatattgcttcctcccagccctgtggtggtgggaacgaccgacaggtcgggcgcgcctacctacagctggggtgaaaaagagacggacgtcttcgtccttaacaacaccaggccaccgctgggcaactggtttggttgacctggatgaactcaactggattcaccaaagtgtgcggagcgcccccttgtgtcatcggaggggtgggcaacaacaccttgctctgccccactgactgtttccgcaagcatccggaagccacatactctcggtgcggctctgtccctggatcacacccaggtgcatggtcgactacccgtataggctttggcattatccctgtaccatcaactataccagattcaaagtcaggatgtacgtgggaggggtcgagcacaggctagatgcgcttgcaactggacgcggggcgagcgctgtgatctggaagacagggacaggtccgagctcagcccattgctgctgtccaccacacagtggcaagtccttccgtgttctttcacgaccctgccagccttgtccaccggcctctccacctccaccagaacattgtggacgtgcagtacttgtacggggtggggtcaagcatcgcgtcctgggccatcaagtgggagtacgtcattctcctgtttcttctgctcgcagacgcgcgcgtctgtcctgcttgtggatgatgttactcatatcccaagcggaggcggctttggagaacctcgtaatactcaatgcagcatccctggccgggacgcacggtctcgtgtccttcctcacgttcttctgctttgcgtggtatctgaaggtaggtgggtgcccggagcggtctacgccctctacgggatgtggcctctcctcctgctcctgttggcgctgcctcagcgagcgtacgcactggacacggaggtggccgcgtcgtgtggcggcgcaatcttgtcgggttaatggcgctgactctgtcaccatattataagcgctacatcagcttgtgcttgtggtggcttcagtatcttctgaccagggtagaagcgcaactgcacgtgtgggttccccccctcagcgtccgagggggggtgatgccgtcatcttactcatgtgtgttgtacacccgactttgctatttgacatcaccaaactactgctggccatcttcggacccctttggattcttcaagccagtttgctcagagtcccctacttgtgcgcgttcaaggccttctccggatctgcgcgctggcgcggaagatggttggaggccattacgtgcagatggccatcatcaagttaggggcgcttaccggcacctatgtttataaccaccttactcctcttcgggactggcgcacaacggcctgcgagatctggccgtggctgtggaaccagtcgtcttctcccgaatggagaccaagctcatcacgtggggggcagacaccgccgcgtgcggtgacatcatcaacggcttgcccgttccgcccgtaggggccgggagatactgcttggaccagccgacggaatggtctccaaggggtggaggttgctggcgcccatcacggcgtacgcccagcagacgagaggcctcctagggtgcataatcaccagcctgaccggcgggacaaaaaccaagtggagggtgaggttcagatcgtgtcaactgctgcccaaaccttcttggcaacgtgcatcaatggggtatgctggactgtctaccacggggctggaacgaggaccatcgcatctccaagggtcctgttatccagatgtataccaatgtagaccaagaccttgtgggctggcccgctcctcaaggctcccgctcactgacaccctgcacctgcggctcctcggacctttacctggtcacgaggcacgccgatgtcttcccgtgcgccggcggggtgatagcaggggcagcctgctttcgccccggcccatttcctacttgaaaggctcctcggggggtccgctgttgtgccccgcgggacacgccgtgggcatatttagggcgcggtgtgcacccgtggagtggctaaggcggtggacttcatccccgtggagaacctagagacaaccatgagatccccggtgttcacggacaactcctccccaccagcagtgccccagagcttccaggtggcccacctgcatctcccaccggcagcggtaagagcaccaaggtcccggccgcatacgcagctcagggctacaaggtgttagtgctcaacccctctgttgctgcaacattgggttttggcacttacatgtccaaggcccaggggtcgaccctaatatcaggactggggtgagaacaattaccactggcagccccatcacgtactccacctacggcaagttccttgccgacggcgggtgctcggggggtgcttatgacataataatttgcgacgagtgccacccacggatgccacatccatcttgggcatcggcaccgtccttgaccaagcagagactgcgggagcgagactggttgtgctcgccactgctacccctccgggctccgtcactgtgccccatcctaacatgaggaggttgctctgtccactaccggagagatccccttttacggcaaggctatcccccttgaggtgatcaaggggggaagacatctcatcttctgccactcaaagaagaagtgcgatgagctcgccgcaaagctggtcgcataggcgtcaacgccgtggcctactaccgcggtcttgacgtgtctgtcatcccgaccagcggcgacgtcgtcgtcgtggcgactgatgccctcatgactggctataccggcgacttcgactccgtgatgactgcaacacgtgtgtcacccagacagtcgatttcagccttgaccctaccttcaccattgagacaaccacgctcccccaggacgctgtctcccggactcaacgtcggggcaggactggtagggggaagccaggcatctacgatttgtggcaccgggggagcgtccctccggcatgttcgactcgtccgtcctctgtgagtgctatgacgcgggctgtgcttggtacgagctcacgcccgccgagactacagttaggctacgagcgtaatgaacaccccggggcttcccgtgtgccaggatcatcttgaattttgggagggcgtctttacgggcctcactcatatagatgcccactttctatcccagacaaagcaaggtggggagaactttccttacctggtagcgtacaagccaccgtgtgcgctagggctcaagcccctcccccatcgtgggaccagatgtggaagtgcttgatccgcctcaaacccacccttcatgggccaacacccctgctatacagactgggcgctgttcaaatgaagtcaccctgacgcacccaatcaccaaatacatcatgacatgcatgtcggctga

SEQ ID NO: 689 - DNA, 4869 bp, Hepatitis C virus
ccgcccacaggacgtcaagttcccgggtggcggtcagatcgttggtggagtttacttgttgccgcgcaggggccctagattgggtgtgcgcgcgacgaggaagacttccgagcggtcgcaacctcgagtagacgtcagcctatccccaaggctcgtcggcccgagggcaggacctgggctcagcccgggtacccttggcccctctatggcaatgagggttgcggttgggcgggatggctcctgtctccccgcggtctcggcctagctggggccccacggacccccggcgtaggtcgcgcaatttgggtaaggtcatcgatacccttacgtgtggcttcgccgatctcatggggtacataccgctcgtcggcgcccctcttggaggcgctgccaggccctggcgcacggcgtccgggttctggaagacggcgtgaattatgcaacagggaatcttcctggttgctctttctctatcttccttctggccctgctctcttgcttgactgtgcccgcttcagcctacaagtgcgcaactcctcagggctttaccatgtcaccaatgattgccctaactcgagtattgtgtacgaggcgggtgatgccatcctgcacactccggggtgtgtcccttgcgttcgcgagggtaacacctcgaggtgttggtggcggtgacccccacggtggccaccagggacggcaaactccccacaacgcagcttcggcgccacatcgatctgcttgtcgggagcgccaccctttgctcggccctctacgtgggggacctgtgcggtctgtctttcttgtcggccaactgttcaccttttctcccaggcgccactggacaacgcaagattgcaattgttctatgtatcccggccatataacgggtcaccgcatggcatgggatatgatgatgaactggtcccctacgcggcgttggtggtagctcagctgctccggatcccacaagccatcatggacatgatcgctggtgctcactggggagtcctggcgggcatagcgtatttctccatggtggggaactgggcgaaggtcctgtagtgctgctgctatttgccggcgttgacgcggaaacccacgtcaccgggggaagtgccggccataccgtgtctgggttcgctgggctcttcacaacgggacccaagcagaatatccaactgatcaacaccaacggcagtggcacatcaatagcacggccttgaactgcaatgataccctcaacaccggctggatagcagggctcctctatcaccacaaattcaactcttcgggctgttccgagaggttggccagctgccggcgcctaccgatttttctcagggctggggccccatcagttatgccaacggaagcgggcccgaccaacggccctactgctggcactaccccccaaagccttgtactattgtgcccgcaaagaacgtgtgtggcccagtatattgcttcctcccagccctgtggtggtgggaacgaccgacaggtcgggcgcgcctacctacagctggggtgaaaaagagacggacgtcttcgtccttaacaacaccaggccaccgctgggcaactggtttggttgacctggatgaactcaactggattcaccaaagtgtgcggagcgcccccttgtgtcatcggaggggtgggcaacaacaccttgctctgccccactgactgtttccgcaagcatccggaagccacatactctcggtgcggctctgtccctggatcacacccaggtgcatggtcgactacccgtataggctttggcattatccctgtaccatcaactataccagattcaaagtcaggatgtacgtgggaggggtcgagcacaggctagatgcgcttgcaactggacgcggggcgagcgctgtgatctggaagacagggacaggtccgagctcagcccattgctgctgtccaccacacagtggcaagtccttccgtgttctttcacgaccctgccagccttgtccaccggcctctccacctccaccagaacattgtggacgtgcagtacttgtacggggtggggtcaagcatcgcgtcctgggccatcaagtgggagtacgtcattctcctgtttcttctgctcgcagacgcgcgcgtctgtcctgcttgtggatgatgttactcatatcccaagcggaggcggctttggagaacctcgtaatactcaatgcagcatccctggccgggacgcacggtctcgtgtccttcctcacgttcttctgctttgcgtggtatctgaaggtaggtgggtgcccggagcggtctacgccctctacgggatgtggcctctcctcctgctcctgttggcgctgcctcagcgagcgtacgcactggacacggaggtggccgcgtcgtgtggcggcgcaatcttgtcgggttaatggcgctgactctgtcaccatattataagcgctacatcagcttgtgcttgtggtggcttcagtatcttctgaccagggtagaagcgcaactgcacgtgtgggttccccccctcagcgtccgagggggggtgatgccgtcatcttactcatgtgtgttgtacacccgactttgctatttgacatcaccaaactactgctggccatcttcggacccctttggattcttcaagccagtttgctcagagtcccctacttgtgcgcgttcaaggccttctccggatctgcgcgctggcgcggaagatggttggaggccattacgtgcagatggccatcatcaagttaggggcgcttaccggcacctatgtttataaccaccttactcctcttcgggactggcgcacaacggcctgcgagatctggccgtggctgtggaaccagtcgtcttctcccgaatggagaccaagctcatcacgtggggggcagacaccgccgcgtgcggtgacatcatcaacggcttgcccgttccgcccgtaggggccgggagatactgcttggaccagccgacggaatggtctccaaggggtggaggttgctggcgcccatcacggcgtacgcccagcagacgagaggcctcctagggtgcataatcaccagcctgaccggcgggacaaaaaccaagtggagggtgaggttcagatcgtgtcaactgctgcccaaaccttcttggcaacgtgcatcaatggggtatgctggactgtctaccacggggctggaacgaggaccatcgcatctccaagggtcctgttatccagatgtataccaatgtagaccaagaccttgtgggctggcccgctcctcaaggctcccgctcactgacaccctgcacctgcggctcctcggacctttacctggtcacgaggcacgccgatgtcttcccgtgcgccggcggggtgatagcaggggcagcctgctttcgccccggcccatttcctacttgaaaggctcctcggggggtccgctgttgtgccccgcgggacacgccgtgggcatatttagggcgcggtgtgcacccgtggagtggctaaggcggtggacttcatccccgtggagaacctagagacaaccatgagatccccggtgttcacggacaactcctccccaccagcagtgccccagagcttccaggtggcccacctgcatctcccaccggcagcggtaagagcaccaaggtcccggccgcatacgcagctcagggctacaaggtgttagtgctcaacccctctgttgctgcaacattgggttttggcgcttacatgtccaaggcccaggggtcgaccctaatatcaggactggggtgagaacaattaccactggcagccccatcacgtactccacctacggcaagttccttgccgacggcgggtgctcggggggtgcttatgacataataatttgcgacgagtgccacccacggatgccacatccatcttgggcatcggcaccgtccttgaccaagcagagactgcgggagcgagactggttgtgctcgccactgctacccctccgggctccgtcactgtgccccatcctaacatgaggaggttgctctgtccactaccggagagatccccttttacggcaaggctatcccccttgaggtgatcaaggggggaagacatctcatcttctgccactcaaagaagaagtgcgatgagctcgccgcaaagctggtcgcataggcgtcaacgccgtggcctactaccgcggtcttgacgtgtctgtcatcccgaccagcggcgacgtcgtcgtcgtggcgactgatgccctcatgactggctataccggcgacttcgactccgtgatgactgcaacacgtgtgtcacccagacagtcgatttcagccttgaccctaccttcaccattgagacaaccacgctcccccaggacgctgtctcccggactcaacgtcggggcaggactggtagggggaagccaggcatctacgatttgtggcaccgggggagcgtccctccggcatgttcgactcgtccgtcctctgtgagtgctatgacgcgggctgtgcttggtacgagctcacgcccgccgagactacagttaggctacgagcgtaatgaacaccccggggcttcccgtgtgccaggatcatcttgaattttgggagggcgtctttacgggcctcactcatatagatgcccactttctatcccagacaaagcaaggtggggagaactttccttacctggtagcgtacaagccaccgtgtgcgctagggctcaagcccctcccccatcgtgggaccagatgtggaagtgcttgatccgcctcaaacccacccttcatgggccaacacccctgctatacagactgggcgctgttcaaatgaagtcaccctgacgcacccaatcaccaaatacatcatgacatgcatgtcggctga

SEQ ID NO: 690 - DNA, 4869 bp, Hepatitis C virus
ccgcccacaggacgttaagttcccgggtggcggtcagatcgttggtggagtttacttgttgccgcgcaggggccctagattgggtgtgcgcgcgacgaggaagacttccgagcggtcgcaacctcgagtagacgtcagcctatccccaaggctcgtcggcccgagggcaggacctgggctcagcccgggtacccttggcccctctatggcaatgagggttgcggttgggcgggatggctcctgtctccccgcggtctcggcctagctggggccccacggacccccggcgtaggtcgcgcaatttgggtaaggtcatcgatacccttacgtgtggcttcgccgatctcatggggtacataccgctcgtcggcgcccctcttggaggcgctgccaggccctggcgcacggcgtccgggttctggaagacggcgtgaattatgcaacagggaatcttcctggttgctctttctctatcttccttctggccctgctctcttgcttgactgtgcccgcttcagcctacaagtgcgcaactcctcagggctttaccatgtcaccaatgattgccctaactcgagtattgtgtacgaggcgggtgatgccatcctgcacactccggggtgtgtcccttgcgttcgcgagggtaacacctcgaggtgttggtggcggtgacccccacggtggccaccagggacggcaaactccccacaacgcagcttcggcgccacatcgatctgcttgtcgggagcgccaccctttgctcggccctctacgtgggggacctgtgcggtctgtctttcttgtcggccaactgttcaccttttctcccaggcgccactggacaacgcaagattgcaattgttctatgtatcccggccatataacgggtcaccgcatggcatgggatatgatgatgaactggtcccctacgcggcgttggtggtagctcagctgctccggatcccacaagccatcatggacatgatcgctggtgctcactggggagtcctggcgggcatagcgtatttctccatggtggggaactgggcgaaggtcctgtagtgctgctgctatttgccggcgtcgacgcggaaacccacgtcaccgggggaagtgccggccataccgtgtctgggttcgctgggctcttcacaacaggacccaagcagaatatccaactgatcaacaccaacggcagtggcacatcaatagcacggccttgaactgcaatgataccctcaacaccggctggatagcagggctcctctatcaccacaaattcaactcttcgggctgttccgagaggttggccagctgccgacgcctaccgatttttctcagggctggggccccatcagttatgccaacggaagcgggcccgaccaacggccctactgctggcactaccccccaaagccttgtactattgtgcccgcaaagaacgtgtgtggcccagtatattgcttcctcccagccctgtggtggtgggaacgaccgacaggtcgggcgcgcctacctacagctggggtgaaaaagagacggacgtcttcgtccttaacaacaccaggccaccgctgggcaactggtttggttgacctggatgaactcaactggattcaccaaagtgtgcggtgcgcccccttgtgtcatcggaggggtgggcaacaacaccttgctctgccccactgactgtttccgcaagcatccggaagccacatactctcggtgcggctccgtccctggatcacacccaggtgcatggtcgactacccgtataggctttggcattatccctgtaccatcaactataccagattcaaagtcaggatgtacgtgggaggggtcgagcacaggctagatgcgcctgcaactggacgcggggcgagcgctgtgatctggaagacagggacaggtccgagctcagcccattgctgctgtccactacacagtggcaagtccttccgtgttctttcacgaccctgccagccttgtccaccggcctctccacctccaccagaacattgtggacgtgcagtacttgtacggggtggggtcaagcatcgcgtcctgggccattaagtgggagtacgtcattctcctgtttcttctgctcgcagacgcgcgcgtctgtcctgcttgtggatgatgttactcatatcccaagcggaggcggctttggagaacctcgtaatacttaatgcagcatccctggccgggacgcacggtctcgtgtccttcctcacgttcttctgctttgcgtggtatctgaaggtaggtgggtgcccggagcggtctacgccctctacgggatgtggcctctcctcctgctcctgttggcgctgcctcagcgagcgtacgcactggacacggaggtggccgcgtcgtgtggcggcgcaatcttgtcgggttaatggcgctgactctgtcaccatattataagcgctacatcagcttgtgcttgtggtggcttcagtatcttctgaccagggtagaagcgcaactgcacgtgtgggttccccccctcagcgtccgagggggggtgatgccgtcatcttactcatgtgtgttgtacacccgactttgctatttgacatcaccaaactactgctggccatcttcggacccctttggattcttcaagccagtttgctcagagtcccctacttgtgcgcgttcaaggccttctccggatctgtgcgctagcgcgggagatggttggaggtcattacgtgcagatggccatcatcaagttaggggcgcttaccggcacctatgtttataaccaccttactcctcttcgggactggcgcacaacggcctgcgagatctggccgtggctgtggaaccagtcgtcttctcccgaatggagaccaagctcatcacgtggggggcagacaccgccgcgtgcggtgacatcatcaacggcttgcccgttccgcccgtaggggccgggagatactgcttggaccagccgacggaatggtctccaaggggtggaggttgctggcgcccatcacggcgtacgcccagcagacgagaggcctcctagggtgcataatcaccagcctgaccggcgggacaaaaaccaagtggagggtgaggttcagatcgtgtcaactgctgcccaaaccttcttggcgacgtgcatcaatggggtatgctggactgtctaccacggggctggaacgaggaccatcgcatctccaagggtcctgttatccagatgtataccaatgtagaccaagaccttgtgggctggcccgctcctcaaggctcccgctcactgacaccctgcacctgcggctcctcggacctttacctggtcacgaggcacgccgatgtcttcccgtgcgccggcggggtgatagcaggggcagcctgctttcgccccggcccatttcctacttgaagggctcctcggggggtccgctgttgtgccccgcgggacacgccgtgggcatatttagggcgcggtgtgcacccgtggagtggctaaggcggtggacttcatccccgtggagaacctagagacaaccatgagatccccggtgttcacggacaactcctccccaccagcagtgccccagagcttccaggtggcccacctgcatctcccaccggcagcggtaagagcaccaaggtcccggccgcatacgcagctcagggctacaaggtgttagtgctcaacccctctgttgctgcaacattgggttttggcgcttacatgtccaaggcccaggggtcgatcctaatatcaggactggggtgagaacaattaccactggcagccccatcacgtactccacctacggcaagttccttgccgacggcgggtgctcggggggtgcttatgacataataatttgcgacgagtgccatccacggatgccacatccatcttgggcatcggcaccgtccttgaccaagcagagactgcgggagcgagactggttgtgctcgccactgctacccctccgggctccgtcactgtgccccatcctaacatgaggaggttgctctgtccactaccggagagatccccttttacggcaaggctatccccctcgaggtgatcaaggggggaagacatctcatcttctgccactcaaagaagaagtgcgatgagctcgccgcaaagctggtcgcataggcgtcaatgccgtggcctactaccgcggtcttgacgtgtctgtcatcccgaccagcggcgacgtcgtcgtcgtggcgactgatgccctcatgactggctataccggcgacttcgactccgtgatgactgcaacacgtgtgtcacccagacagtcgatttcagccttgaccctaccttcaccattgagacaaccacgctcccccaggacgctgtctcccggactcaacgtcggggcaggactggtagggggaagccaggcatctacgatttgtggcaccgggagagcgtccctccggcatgttcgactcgtccgtcctctgtgagtgctatgacgcgggctgtgcttggtacgagctcacgcccgccgagactacagttaggctgcgagcgtaatgaacaccccggggcttcccgtgtgccaggatcatcttgaattttgggagggcgtctttacgggcctcactcatatagatgcccactttctatcccagacaaagcaaggtggggagaactttccttacctggtagcgtacaagccaccgtgtgcgctagggctcaagcccctcccccatcgtgggaccagatgtggaagtgcttgatccgcctcaaacccacccttcatgggccaacacccctgctatacagactgggcgctgttcaaatgaagtcaccctgacgcacccaatcaccaaatacatcatgacatgcatgtcggctga

SEQ ID NO: 691 - DNA, 4869 bp, Hepatitis C virus
ccgcccacaggacgttaagttcccgggtggcggtcagatcgttggtggagtttacttgttgccgcgcaggggccctagattgggtgtgcgcgcgacgaggaagacttccgagcggtcgcaacctcgagtagacgtcagcctatccccaaggctcgtcggcccgagggcaggacctgggctcagcccgggtacccttggcccctctatggcaatgagggttgcggttgggcgggatggctcctgtctccccgcggtctcggcctagctggggccccacggacccccggcgtaggtcgcgcaatttgggtaaggtcatcgatacccttacgtgtggcttcgccgatctcatggggtacataccgctcgtcggcgcccctcttggaggcgctgccaggccctggcgcacggcgtccgggttctggaagacggcgtgaattatgcaacagggaatcttcctggttgctctttctctatcttccttctggccctgctctcttgcttgactgtgcccgcttcagcctacaagtgcgcaactcctcagggctttaccatgtcaccaatgattgccctaactcgagtattgtgtacgaggcgggtgatgccatcctgcacactccggggtgtgtcccttgcgttcgcgagggtaacacctcgaggtgttggtggcggtgacccccacggtggccaccagggacggcaaactccccacaacgcagcttcggcgccacatcgatctgcttgtcgggagcgccaccctttgctcggccctctacgtgggggacctgtgcggtctgtctttcttgtcggccaactgttcaccttttctcccaggcgccactggacaacgcaagattgcaattgttctatgtatcccggccatataacgggtcaccgcatggcatgggatatgatgatgaactggtcccctacgcggcgttggtggtagctcagctgctccggatcccacaagccatcatggacatgatcgctggtgctcactggggagtcctggcgggcatagcgtatttctccatggtggggaactgggcgaaggtcctgtagtgctgctgctatttgccggcgtcgacgcggaaacccacgtcaccgggggaagtgccggccataccgtgtctgggttcgctgggctcttcacaacaggacccaagcagaatatccaactgatcaacaccaacggcagtggcacatcaatagcacggccttgaactgcaatgataccctcaacaccggctggatagcagggctcctctatcaccacaaattcaactcttcgggctgttccgagaggttggccagctgccgacgcctaccgatttttctcagggctggggccccatcagttatgccaacggaagcgggcccgaccaacggccctactgctggcactaccccccaaagccttgtactattgtgcccgcaaagaacgtgtgtggcccagtatattgcttcctcccagccctgtggtggtgggaacgaccgacaggtcgggcgcgcctacctacagctggggtgaaaaagagacggacgtcttcgtccttaacaacaccaggccaccgctgggcaactggtttggttgacctggatgaactcaactggattcaccaaagtgtgcggtgcgcccccttgtgtcatcggaggggtgggcaacaacaccttgctccgccccactgactgtttccgcaagcatccggaagccacatactctcggtgcggctccgtccctggatcacacccaggtgcatggtcgactacccgtataggctttggcattatccctgtaccatcaactataccagattcaaagtcaggatgtacgtgggaggggtcgagcacaggctagatgcgcctgcaactggacgcggggcgagcgctgtgatctggaagacagggacaggtccgagctcagcccattgctgctgtccactacacagtggcaagtccttccgtgttctttcacgaccctgccagccttgtccaccggcctctccacctccaccagaacattgtggacgtgcagtacttgtacggggtggggtcaagcatcgcgtcctgggccattaagtgggagtacgtcattctcctgtttcttctgctcgcagacgcgcgcgtctgtcctgcttgtggatgatgttactcatatcccaagcggaggcggctttggagaacctcgtaatacttaatgcagcatccctggccgggacgcacggtctcgtgtccttcctcacgttcttctgctttgcgtggtatctgaaggtaggtgggtgcccggagcggtctacgccctctacgggatgtggcctctcctcctgctcctgttggcgctgcctcagcgagcgtacgcactggacacggaggtggccgcgtcgtgtggcggcgcaatcttgtcgggttaatggcgctgactctgtcaccatattataagcgctacatcagcttgtgcttgtggtggcttcagtatcttctgaccagggtagaagcgcaactgcacgtgtgggttccccccctcagcgtccgagggggggtgatgccgtcatcttactcatgtgtgttgtacacccgactttgctatttgacatcaccaaactactgctggccatcttcggacccctttggattcttcaagccagtttgctcagagtcccctacttgtgcgcgttcaaggccttctccggatctgtgcgctagcgcgggagatggttggaggtcattacgtgcagatggccatcatcaagttaggggcgcttaccggcacctatgtttataaccaccttactcctcttcgggactggcgcacaacggcctgcgagatctggccgtggctgtggaaccagtcgtcttctcccgaatggagaccaagctcatcacgtggggggcagacaccgccgcgtgcggtgacatcatcaacggcttgcccgttccgcccgtaggggccgggagatactgcttggaccagccgacggaatggtctccaaggggtggaggttgctggcgcccatcacggcgtacgcccagcagacgagaggcctcctagggtgcataatcaccagcctgaccggcgggacaaaaaccaagtggagggtgaggttcagatcgtgtcaactgctgcccaaaccttcttggcaacgtgcatcaatggggtatgctggactgtctaccacggggctggaacgaggaccatcgcatctccaagggtcctgttatccagatgtataccaatgtagaccaagaccttgtgggctggcccgctcctcaaggctcccgctcactgacaccctgcacctgcggctcctcggacctttacctggtcacgaggcacgccgatgtcttcccgtgcgccggcggggtgatagcaggggcagcctgctttcgccccggcccatttcctacttgaagggctcctcggggggtccgctgttgtgccccgcgggacacgccgtgggcatatttagggcgcggtgtgcacccgtggagtggctaaggcggtggacttcatccccgtggagaacctagagacaaccatgagatccccggtgttcacggacaactcctccccaccagcagtgccccagagcttccaggtggcccacctgcatctcccaccggcagcggtaagagcaccaaggtcccggccgcatacgcagctcagggctacaaggtgttagtgctcaacccctctgttgctgcaacattgggttttggcgcttacatgtccaaggcccaggggtcgatcctaatatcaggactggggtgagaacaattaccactggcagccccatcacgtactccacctacggcaagttccttgccgacggcgggtgctcggggggtgcttatgacataataatttgcgacgagtgccatccacggatgccacatccatcttgggcatcggcaccgtccttgaccaagcagagactgcgggagcgagactggttgtgctcgccactgctacccctccgggctccgtcactgtgccccatcctaacatgaggaggttgccctgtccactaccggagagatccccttttacggcaaggctatccccctcgaggtgatcaaggggggaagacatctcatcttctgccactcaaagaagaagtgcgatgagctcgccgcaaagctggtcgcataggcgtcaatgccgtggcctactaccgcggtcttgacgtgtctgtcatcccgaccagcggcgacgtcgtcgtcgtggcgactgatgccctcatgactggctataccggcgacttcgactccgtgatgactgcaacacgtgtgtcacccagacagtcgatttcagccttgaccctaccttcaccattgagacaaccacgctcccccaggacgctgtctcccggactcaacgtcggggcaggactggtagggggaagccaggcatctacgatttgtggcaccgggagagcgtccctccggcatgttcgactcgtccgtcctctgtgagtgctatgacgcgggctgtgcttggtacgagctcacgcccgccgagactacagttaggctgcgagcgtaatgaacaccccggggcttcccgtgtgccaggatcatcttgaattttgggagggcgtctttacgggcctcactcatatagatgcccactttctatcccagacaaagcaaggtggggagaactttccttacctggtagcgtacaagccaccgtgtgcgctagggctcaagcccctcccccatcgtgggaccagatgtggaagtgcttgatccgcctcaaacccacccttcatgggccaacacccctgctatacagactgggcgctgttcaaatgaagtcaccctgacgcacccaatcaccaaatacatcatgacatgcatgtcggctga

SEQ ID NO: 692 - DNA, 4869 bp, Hepatitis C virus
ccgcccacaggacgttaagttcccgggtggcggtcagatcgttggtggagtttacttgttgccgcgcaggggccctagattgggtgtgcgcgcgacgaggaagacttccgagcggtcgcaacctcgagtagacgtcagcctatccccaaggctcgtcggcccgagggcaggacctgggctcagcccgggtacccttggcccctctatggcaatgagggttgcggttgggcgggatggctcctgtctccccgcggtctcggcctagctggggccccacggacccccggcgtaggtcgcgcaatttgggtaaggtcatcgatacccttacgtgtggcttcgccgatctcatggggtacataccgctcgtcggcgcccctcttggaggcgctgccaggccctggcgcacggcgtccgggttctggaagacggcgtgaattatgcaacagggaatcttcctggttgctctttctctatcttccttctggccctgctctcttgcttgactgtgcccgcttcagcctacaagtgcgcaactcctcagggctttaccatgtcaccaatgattgccctaactcgagtattgtgtacgaggcgggtgatgccatcctgcacactccggggtgtgtcccttgcgttcgcgagggtaacacctcgaggtgttggtggcggtgacccccacggtggccaccagggacggcaaactccccacaacgcagcttcggcgccacatcgatctgcttgtcgggagcgccaccctttgctcggccctctacgtgggggacctgtgcggtctgtctttcttgtcggccaactgttcaccttttctcccaggcgccactggacaacgcaagattgcaattgttctatgtatcccggccatataacgggtcaccgcatggcatgggatatgatgatgaactggtcccctacgcggcgttggtggtagctcagctgctccggatcccacaagccatcatggacatgatcgctggtgctcactggggagtcctggcgggcatagcgtatttctccatggtggggaactgggcgaaggtcctgtagtgctgctgctatttgccggcgtcgacgcggaaacccacgtcaccgggggaagtgccggccataccgtgtctgggttcgctgggctcttcacaacaggacccaagcagaatatccaactgatcaacaccaacggcagtggcacatcaatagcacggccttgaactgcaatgataccctcaacaccggctggatagcagggctcctctatcaccacaaattcaactcttcgggctgttccgagaggttggccagctgccgacgcctaccgatttttctcagggctggggccccatcagttatgccaacggaagcgggcccgaccaacggccctactgctggcactaccccccaaagccttgtactattgtgcccgcaaagaacgtgtgtggcccagtatattgcttcctcccagccctgtggtggtgggaacgaccgacaggtcgggcgcgcctacctacagctggggtgaaaaagagacggacgtcttcgtccttaacaacaccaggccaccgctgggcaactggtttggttgacctggatgaactcaactggattcaccaaagtgtgcggtgcgcccccttgtgtcatcggaggggtgggcaacaacaccttgctctgccccactgactgtttccgcaagcatccggaagccacatactctcggtgcggctccgtccctggatcacacccaggtgcatggtcgactacccgtataggctttggcattatccctgtaccatcaactataccagattcaaagtcaggatgtacgtgggaggggtcgagcacaggctagatgcgcctgcaactggacgcggggcgagcgctgtgatctggaagacagggacaggtccgagctcagcccattgctgctgtccactacacagtggcaagtccttccgtgttctttcacgaccctgccagccttgtccaccggcctctccacctccaccagaacattgtggacgtgcagtacttgtacggggtggggtcaagcatcgcgtcctgggccattaagtgggagtacgtcattctcctgtttcttctgctcgcagacgcgcgcgtctgtcctgcttgtggatgatgttactcatatcccaagcggaggcggctttggagaacctcgtaatacttaatgcagcatccctggccgggacgcacggtctcgtgtccttcctcacgttcttctgctttgcgtggtatctgaaggtaggtgggtgcccggagcggtctacgccctctacgggatgtggcctctcctcctgctcctgttggcgctgcctcagcgagcgtacgcactggacacggaggtggccgcgtcgtgtggcggcgcaatcttgtcgggttaatggcgctgactctgtcaccatattataagcgctacatcagcttgtgcttgtggtggcttcagtatcttctgaccagggtagaagcgcaactgcacgtgtgggttccccccctcagcgtccgagggggggtgatgccgtcatcttactcatgtgtgttgtacacccgactttgctatttgacatcaccaaactactgctggccatcttcggacccctttggattcttcaagccagtttgctcagagtcccctacttgtgcgcgttcaaggccttctccggatctgtgcgctagcgcgggagatggttggaggtcattacgtgcagatggccatcatcaagttaggggcgcttaccggcacctatgtttataaccaccttactcctcttcgggactggcgcacaacggcctgcgagatctggccgtggctgtggaaccagtcgtcttctcccgaatggagaccaagctcatcacgtggggggcagacaccgccgcgtgcggtgacatcatcaacggcttgcccgttccgcccgtaggggccgggagatactgcttggaccagccgacggaatggtctccaaggggtggaggttgctggcgcccatcacggcgtacgcccagcggacgagaggcctcctagggtgcataatcaccagcctgaccggcgggacaaaaaccaagtggagggtgaggttcagatcgtgtcaactgctgcccaaaccttcttggcaacgtgcatcaatggggtatgctggactgtctaccacggggctggaacgaggaccatcgcatctccaagggtcctgttatccagatgtataccaatgtagaccaagaccttgtgggctggcccgctcctcaaggctcccgctcactgacaccctgcacctgcggctcctcggacctttacctggtcacgaggcacgccgatgtcttcccgtgcgccggcggggtgatagcaggggcagcctgctttcgccccggcccatttcctacttgaagggctcctcggggggtccgctgttgtgccccgcgggacacgccgtgggcatatttagggcgcggtgtgcacccgtggagtggctaaggcggtggacttcatccccgtggagaacctagagacaaccatgagatccccggtgttcacggacaactcctccccaccagcagtgccccagagcttccaggtggcccacctgcatctcccaccggcagcggtaagagcaccaaggtcccggccgcatacgcagctcagggctacaaggtgttagtgctcaacccctctgttgctgcaacattgggttttggcgcttacatgtccaaggcccaggggtcgatcctaatatcaggactggggtgagaacaattaccactggcagccccatcacgtactccacctacggcaagttccttgccgacggcgggtgctcggggggtgcttatgacataataatttgcgacgagtgccatccacggatgccacatccatcttgggcatcggcaccgtccttgaccaagcagagactgcgggagcgagactggttgtgctcgccactgctacccctccgggctccgtcactgtgccccatcctaacatgaggaggttgctctgtccactaccggagagatccccttttacggcaaggctatccccctcgaggtgatcaaggggggaagacatctcatcttctgccactcaaagaagaagtgcgatgagctcgccgcaaagctggtcgcataggcgtcaatgccgtggcctactaccgcggtcttgacgtgtctgtcatcccgaccagcggcgacgtcgtcgtcgtggcgactgatgccctcatgactggctataccggcgacttcgactccgtgatgactgcaacacgtgtgtcacccagacagtcgatttcagccttgaccctaccttcaccattgagacaaccacgctcccccaggacgctgtctcccggactcaacgtcggggcaggactggtagggggaagccaggcatctacgatttgtggcaccgggagagcgtccctccggcatgttcgactcgtccgtcctctgtgagtgctatgacgcgggctgtgcttggtacgagctcacgcccgccgagactacagttaggctgcgagcgtaatgaacaccccggggcttcccgtgtgccaggatcatcttgaattttgggagggcgtctttacgggcctcactcatatagatgcccactttctatcccagacaaagcaaggtggggagaactttccttacctggtagcgtacaagccaccgtgtgcgctagggctcaagcccctcccccatcgtgggaccagatgtggaagtgcttgatccgcctcaaacccacccttcatgggccaacacccctgctatacagactgggcgctgttcaaatgaagtcaccctgacgcacccaatcaccaaatacatcatgacatgcatgtcggctga

SEQ ID NO: 693 - DNA, 4869 bp, Hepatitis C virus
ccgcccgcaggacgttaagttcccgggtggcggtcagatcgttggtggagtttacttgttgccgcgcaggggccctagattgggtgtgcgcgcgacgaggaagacttccgagcggtcgcaacctcgagtagacgtcagcctatccccaaggctcgtcggcccgagggcaggacctgggctcagcccgggtacccttggcccctctatggcaatgagggttgcggttgggcgggatggctcctgtctccccgcggtctcggcctagctggggccccacggacccccggcgtaggtcgcgcaatttgggtaaggtcatcgatacccttacgtgtggcttcgccgatctcatggggtacataccgctcgtcggcgcccctcttggaggcgctgccaggccctggcgcacggcgtccgggttctggaagacggcgtgaattatgcaacagggaatcttcctggttgctctttctctatcttccttctggccctgctctcttgcttgactgtgcccgcttcagcctacaagtgcgcaactcctcagggctttaccatgtcaccaatgattgccctaactcgagtattgtgtacgaggcgggtgatgccatcctgcacactccggggtgtgtcccttgcgttcgcgagggtaacacctcgaggtgttggtggcggtgacccccacggtggccaccagggacggcaaactccccacaacgcagcttcggcgccacatcgatctgcttgtcgggagcgccaccctttgctcggccctctacgtgggggacctgtgcggtctgtctttcttgtcggccaactgttcaccttttctcccaggcgccactggacaacgcaagattgcaattgttctatgtatcccggccatataacgggtcaccgcatggcatgggatatgatgatgaactggtcccctacgcggcgttggtggtagctcagctgctccggatcccacaagccatcatggacatgatcgctggtgctcactggggagtcctggcgggcatagcgtatttctccatggtggggaactgggcgaaggtcctgtagtgctgctgctatttgccggcgtcgacgcggaaacccacgtcaccgggggaagtgccggccataccgtgtctgggttcgctgggctcttcacaacaggacccaagcagaatatccaactgatcaacaccaacggcagtggcacatcaatagcacggccttgaactgcaatgataccctcaacaccggctggatagcagggctcctctatcaccacaaattcaactcttcgggctgttccgagaggttggccagctgccgacgcctaccgatttttctcagggctggggccccatcagttatgccaacggaagcgggcccgaccaacggccctactgctggcactaccccccaaagccttgtactattgtgcccgcaaagaacgtgtgtggcccagtatattgcttcctcccagccctgtggtggtgggaacgaccgacaggtcgggcgcgcctacctacagctggggtgaaaaagagacggacgtcttcgtccttaacaacaccaggccaccgctgggcaactggtttggttgacctggatgaactcaactggattcaccaaagtgtgcggtgcgcccccttgtgtcatcggaggggtgggcaacaacaccttgctctgccccactgactgtttccgcaagcatccggaagccacatactctcggtgcggctccgtccctggatcacacccaggtgcatggtcgactacccgtataggctttggcattatccctgtaccatcaactataccagattcaaagtcaggatgtacgtgggaggggtcgagcacaggctagatgcgcctgcaactggacgcggggcgagcgctgtgatctggaagacagggacaggtccgagctcagcccattgctgctgtccactacacagtggcaagtccttccgtgttctttcacgaccctgccagccttgtccaccggcctctccacctccaccagaacattgtggacgtgcagtacttgtacggggtggggtcaagcatcgcgtcctgggccattaagtgggagtacgtcattctcctgtttcttctgctcgcagacgcgcgcgtctgtcctgcttgtggatgatgttactcatatcccaagcggaggcggctttggagaacctcgtaatacttaatgcagcatccctggccgggacgcacggtctcgtgtccttcctcacgttcttctgctttgcgtggtatctgaaggtaggtgggtgcccggagcggtctacgccctctacgggatgtggcctctcctcctgctcctgttggcgctgcctcagcgagcgtacgcactggacacggaggtggccgcgtcgtgtggcggcgcaatcttgtcgggttaatggcgctgactctgtcaccatattataagcgctacatcagcttgtgcttgtggtggcttcagtatcttctgaccagggtagaagcgcaactgcacgtgtgggttccccccctcagcgtccgagggggggtgatgccgtcatcttactcatgtgtgttgtacacccgactttgctatttgacatcaccaaactactgctggccatcttcggacccctttggattcttcaagccagtttgctcagagtcccctacttgtgcgcgttcaaggccttctccggatctgtgcgctagcgcgggagatggttggaggtcattacgtgcagatggccatcatcaagttaggggcgcttaccggcacctatgtttataaccaccttactcctcttcgggactggcgcacaacggcctgcgagatctggccgtggctgtggaaccagtcgtcttctcccgaatggagaccaagctcatcacgtggggggcagacaccgccgcgtgcggtgacatcatcaacggcttgcccgttccgcccgtaggggccgggagatactgcttggaccagccgacggaatggtctccaaggggtggaggttgctggcgcccatcacggcgtacgcccagcagacgagaggcctcctagggtgcataatcaccagcctgaccggcgggacaaaaaccaagtggagggtgaggttcagatcgtgtcaactgctgcccaaaccttcttggcaacgtgcatcaatggggtatgctggactgtctaccacggggctggaacgaggaccatcgcatctccaagggtcctgttatccagatgtataccaatgtagaccaagaccttgtgggctggcccgctcctcaaggctcccgctcactgacaccctgcacctgcggctcctcggacctttacctggtcacgaggcacgccgatgtcttcccgtgcgccggcggggtgatagcaggggcagcctgctttcgccccggcccatttcctacttgaagggctcctcggggggtccgctgttgtgccccgcgggacacgccgtgggcatatttagggcgcggtgtgcacccgtggagtggctaaggcggtggacttcatccccgtggagaacctagagacaaccatgagatccccggtgttcacggacaactcctccccaccagcagtgccccagagcttccaggtggcccacctgcatctcccaccggcagcggtaagagcaccaaggtcccggccgcatacgcagctcagggctacaaggtgttagtgctcaacccctctgttgctgcaacattgggttttggcgcttacatgtccaaggcccaggggtcgaccctaatatcaggactggggtgagaacaattaccactggcagccccatcacgtactccacctacggcaagttccttgccgacggcgggtgctcggggggtgcttatgacataataatttgcgacgagtgccatccacggatgccacatccatcttgggcatcggcaccgtccttgaccaagcagagactgcgggagcgagactggttgtgctcgccactgctacccctccgggctccgtcactgtgccccatcctaacatgaggaggttgctctgtccactaccggagagatccccttttacggcaaggctatccccctcgaggtgatcaaggggggaagacatctcatcttctgccactcaaagaagaagtgcgatgagctcgccgcaaagctggtcgcataggcgtcaatgccgtggcctactaccgcggtcttgacgtgtctgtcatcccgaccagcggcgacgtcgtcgtcgtggcgactgatgccctcatgactggctataccggcgacttcgactccgtgatgactgcaacacgtgtgtcacccagacagtcgatttcagccttgaccctaccttcaccattgagacaaccacgctcccccaggacgctgtctcccggactcaacgtcggggcaggactggtagggggaagccaggcatctacgatttgtggcaccgggagagcgtccctccggcatgttcgactcgtccgtcctctgtgagtgctatgacgcgggctgtgcttggtacgagctcacgcccgccgagactacagttaggctgcgagcgtaatgaacaccccggggcttcccgtgtgccaggatcatcttgaattttgggagggcgtctttacgggcctcactcatatagatgcccactttctatcccagacaaagcaaggtggggagaactttccttacctggtagcgtacaagccaccgtgtgcgctagggctcaagcccctcccccatcgtgggaccagatgtggaagtgcttgatccgcctcaaacccacccttcatgggccaacacccctgctatacagactgggcgctgttcaaatgaagtcaccctgacgcacccaatcaccaaatacatcatgacatgcatgtcggctga

SEQ ID NO: 694 - DNA, 4869 bp, Hepatitis C virus
tcgcccacaggacgtcaagttcccgggtggcggtcagatcgttggtggagtttacttgttgccgcgcaggggccctagattgggtgtgcgcgcgacgaggaagacttccgagcggtcgcaacctcgagtagacgtcagcctatccccaaggctcgtcggcccgagggcaggacctgggcccggcccgggtacccttggcccctctatggcaatgagggttgcggttgggcgggatggctcctgtctccccgcggtctcggcctagctggggccccacggacccccggcgcaggtcgcgcaatttgggtaaggtcatcgatacccttacgtgtggcttcgccgatctcatggggtacataccgctcgtcggcgcccctcttggaggcgctgccaggccctggcgcacggcgtccgggttctggaagacggcgtgaattatgcaacagggaatcttcctggttgctctttctctatcttcctcctggccctgctctcttgcttgactgtgcccgcttcagcctacaagtgcgcaactcctcggggctttaccatgtcaccaatgattgccctaactcgagtattgtgtacgaggcgggtgatgccatcctgcacactccggggtgtgtcccttgcgttcgcgagggtaacgcctcgaggtgttggtggcggtgacccccacggtggccaccagggacggcaaactccccacaacgcagcttcggcgccacatcgatctgcttgtcgggagcgccaccctttgctcggccctctacgtgggggacctgtgcggtctgtctttcttgtcggccaactgttcaccttttctcccaggcgccactggacaacgcaagattgcaattgttctatgtatcccggccatataactggtcaccgcatggcatgggatatgatgatgaactggtcccctacgcggcgttggtggtagctcagctgctccggatcccacaagccatcatggacatgatcgctggtgctcactggggagtcctagcgggcatagcgtatttctccatggtggggaactgggcgaaggtcctgtagtgctgctgctatttgccggcgtcgacgcggaaacccacgtcaccgggggaagtgtcgcctacaccacgtctgggttcactagactcttcacatcaggacccagccagaatatccaactgatcaacaccaacggcagtggcacatcaataggacggccttgaactgcaatgatagcctcaacaccggctggatagcagggctcctttatcaccacagattcaactcttcgggctgttccgagaggttggccagctgccgacgcctaccgatttttctcagggctggggccctattagttatgccaacggaagcgggcccgaccaacggccctactgctggcactaccccccaaaaccttgtagtattgtgtctgcaaagaccgtgtgtggcccagtatattgcttcctcccagccctgtggtggtgggaacgaccgacaggtcgggcgcgcctacctacaactggggtgaaaatgagacggacgtcttcgtccttaacaacaccaggccaccgctgggcaactggtttggttgacatggatgaactcatctggattcaccaaagtgtgtggagcgcccccttgcgtcatcggaggggtgggcaacaacaccttgctctgccccactgactgtttccgcaagcatccggaagccacatactctcggtgcggctccgtccctggatcacacccaggtgcatggtcgactacccatataggctttggcattatccctgtaccatcaactataccagatttaaagtcaggatgtacgtgggaggggtcgagcacaggctggatgcgcctgcaactggacgcggggcgagcgctgtgatctggaagacagggacaggtccgagctcagcccattgctgctgtccaccacacagtggcaagtccttccatgttctttcacgaccctaccagccttgtccaccggcctctccacctccaccagaacattgtggacgtgcagtacttgtacggggtggggtcaagcatcgcgtcctgggccattaagtgggagtacgtcattctcctgtttcttctgctcgcagacgcgcgcgtctgtcctgcttgtggatgatgttactcatatcccaagcggaggcggctttggagaacctcgtaatactcaatgcagcatccctggccgggacgcacggtctcgtgtccttcctcacgttcttctgctttgcgtggtatctgaaggtaggtgggtgcccggagcggtctacgccctctacgggatgtggcctctcctcctgctcctgttggcgctgcctcaacgagcatacgcactggacacggaggtggccgcgtcgtgtggcggcgcagtcttgtcgggttaatggcgctgactctgtcaccatattataagcgctacatcagcttgtgcttgtggtggcttcagtatcttctgaccagggtggaagcgcaactgcacgtgtgggttccccccctcaacgtccgagggggggcgatgccgtcatcttactcatgtgtgttgtacacccgactttgctatttgacatcaccaaactactgctggccatcttcggacccctttggattctccaagccagtttgctcagagtcccctacttgtgcgcgttcaaggccttctccggatctgcgcgctagcgcggaagatggttggaggtcattacgtgcagatggccatcatcaagttaggggcgcttaccggcacctatgtttataaccacctcactcctcttcgggactggcgcacaacggcctacgagatctggccgtggctgtggaaccagtcgtcttctcccgaatggagaccaagctcatcacgtggggggcagacaccgccgcgtgcggtgacatcatcaacggcttgcccgttccgcccgcaggggccgggagatactgcttggaccagccgacggaatggtctccaaggggtggaggttgctggcgcccatcacggcgtacgcccagcagacgagaggcctcctagggtgtataatcaccagcctgaccggcgggacaagaaccaagtggaaggtgaggttcagatcgtgtcaactgctgcccaaaccttcctggcaacgtgcatcaatggggtatgctggactgtctaccacggggccggaacgaggaccatcgcatctccaagggtcctgttatccagatgtataccaatgtagaccaagaccttgtgggctggcccgctcctcaaggctcccgctcactgacaccctgcacctgtggctcctcggatctttacctggtcacgaggcacgccgatgtcttcccgtgcgccggcggggtgatagcaggggcagcctgctttcgccccggcccatttcctacttgaaaggctcctcggggggtccgctgttgtgccccgcgggacacgccgtgggcatatttagggcgcggtgtgcacccgtggagtggctaaggcggtggacttcatccccgtggagaacctagagacaaccatgagatccccggtgttcacggacaactcctccccaccagcagtgccccagagcttccaggtggcccatctgcatctcccaccggcagcggtaagagcaccaaggtcccggccgcgtacgcagctcagggctacaaggtgttagtgctcaacccctctgttgctgcaacattgggttttggcgcttacatgtccaaggcccaggggtcgatcctaatatcaggactggggtgagaacaattaccactggcagccccatcacgtactccacctacggcaagttccttgccgacggcgggtgctcggggggtgcctatgacataataatttgcgacgagtgccatccacagatgccacatccatcttgggcatcggcaccgtccttgaccaagcagagactgcgggagcgagactggttgtgctcgccactgctacccctccgggctccgtcactgtgccccatcctaacatgaggaggttgctctgtccactaccggagagatccccttttacggcaaggctatccccctcgaggtgatcaaggggggaagacatctcatcttctgtcactcaaagaagaagtgcgatgagctcgccgcaaagctggtcgcatgggcgtcaatgccgtggcttactaccgcggtcttgacgtgtctgtcatcccgaccagcggcgacgtcgtcgtcgtggcgactgatgccctcatgactggctataccggcgacttcgactccgtgatgactgcaacacgtgtgtcacccaaacagtcgatttcagccttgaccctaccttcaccattgagacaaccacgctcccccaggacgctgtctcccggactcaacgtcggggcaggactggtagggggaagccaggcatctacgatttgtggcaccgggggagcgtccctccggcatgttcgactcatctgtcctctgtgagtgctatgacgcgggctgtgcttggtacgagctcacgcccgccgagactacagttaggctacgagcgtaatgaacaccccggggcttcccgtgtgccaggatcatcttgaattttgggagggcgtctttacgggcctcactcatatagatgcccactttctatcccagacaaagcaaggtggggagaactttccttacctggtagcgtacaagccaccgtgtgcgctagggctcaagcccctcccccatcgtgggaccagatgtggaagtgcttgatccgcctcaaacccaccctccatgggccaacacccctgctatacagactgggcgctgttcaaatgaagtcaccctgacgcacccaatcaccaaatacatcatgacatgcatgtcggctga

SEQ ID NO: 695 - DNA, 4869 bp, Hepatitis C virus
tcgcccacaggacgtcaagttcccgggtggcggtcagatcgttggtggagtttacttgttgccgcgcaggggccctagattgggtgtgcgcgcgacgaggaagacttccgagcggtcgcaacctcgagtagacgtcagcctatccccaaggctcgtcggcccgagggcaggacctgggctcagcccgggtacccttggcccctctatggcaatgagggttgcggttgggcgggatggctcctgtctccccgcggtctcggcctagctggggccccacggacccccggcgcaggtcgcgcaatttgggtaaggtcatcgatacccttacgtgtggcttcgccgatctcatggggtacataccgctcgtcggcgcccctcttggaggcgctgccaggccctggcgcacggcgtccgggttctggaagacggcgtgaattatgcaacagggaatcttcctggttgctctttctctatcttcctcctggccctgctctcttgcttgactgtgcccgcttcagcctacaagtgcgcaactcctcggggctttaccatgtcaccaatgattgccctaactcgagtattgtgtacgaggcgggtgatgccatcctgcacactccggggtgtgtcccttgcgttcgcgagggtaacgcctcgaggtgttggtggcggtgacccccacggtggccaccagggacggcaaactccccacaacgcagcttcggcgccacatcgatctgcttgtcgggagcgccaccctttgctcggccctctacgtgggggacctgtgcggtctgtctttcttgtcggccaactgttcaccttttctcccaagcaccactggacaacgcaagattgcaattgttctatgtatcccggccatataactggtcaccgcatggcatgggatatgatgatgaactggtcccctacgcggcgttggtggtagctcagctactccggatcccacaagccatcatggacatgatcgctggtgctcactggggagtcctagcgggcatagcgtatttctccatggtggggaactgggcgaaggtcctgtagtgctgctgctatttgccggcgtcgacgcggaaacccacgtcaccgggggaagtgtcggctacaccacgtctgggttcgttagactcttcacaccaggacccagccagaatatccaactgatcaacaccaacggcagtggcacatcaataggacggccttgaactgcaatgatagcctcaacaccggctggatagcagggctcctttatcaccacagattcaactcttcgggctgttccgagaggttggccagctgccgacgcctaccgatttttctcagggctggggccctatcagttatgccaacggaagcgggcccgaccaacggccctactgctggcactaccccccaaaaccttgtagtattgtgtctgcaaggaccgtgtgtggcccagtatattgcttcctcccagccctgtggtggtgggaacgaccgacaggtcgggcgcgcctacctacaactggggtgaaaatgagacggacgtcttcgtccttaacaacaccaggccaccgctgggcaactggtttggttgacctggatgaactcatctggattcaccaaagtgtgtggagcgcccccttgcgtcatcggaggggtgggcaacaacaccttgctctgccccactgactgtttccgcaagcatccggaagccacatactctcggtgcggctccgtccctggatcacacccaggtgcatggtcgactacccatataggctttggcattatccctgtaccatcaactataccagatttaaagtcaggatgtacgtgggaggggtcgagcacaggctggatgcgcctgcaactggacgcggggcgagcgctgtgatctggaagacagggacaggtccgagctcagcccattgctgctgtccaccacacagtggcaagtccttccgtgttctttcacgaccctgccagccttgtccaccggcctctccacctccaccagaacattgtggacgtgcagtacttgtacggggtggggtcaagcatcgcgtcctgggccattaagtgggagtacgtcattctcctgtttcttctgctcgcagacgcgcgcgtctgtcctgcttgtggatgatgttactcatatcccaagcggaggcggctttggagaacctcgtaatactcaatgcagcatccctggccgggacgcacggtctcgtgtctttcctcacgttcttctgctttgcgtggtatctgaaggtaggtgggtgcccggagcggtctacgccctctacgggatgtggcctctcctcctgctcctgttggcgctgcctcaacgagcatacgcactggacacggaggtggccgcgtcgtgtggcggcgcagtcttgtcgggttaatggcgctgactctgtcaccatattataagcgctacatcagcttgtgcttgtggtggcttcagtatcttctgaccagggtggaagcgcaactgcacgtgtgggttccccccctcaacgtccgagggggggcgatgccgtcatcttactcatgtgtgttgtacacccgactttgctatttgacatcaccaaactactgctggccatcttcggacccctttggattctccaagccagtttgctcagagtcccctacttgtgcgcgttcaaggccttctccggatctgcgcgctagcgcgggagatggttggaggtcattacgtgcagatggccatcatcaagttaggggcgcttaccggcacctatgtttataaccacctcacccctcttcgggactggcgcacaacggcctgcgagatctggccgtggctgtggaaccagtcgtcttctcccgaatggagaccaagctcatcacgtggggggcagacaccgccgcgtgcggtgacatcatcaacggcttgcccgttccgcccgtaggggccgggagatactgcttggaccagccgacggaatggtttccaaggggtggaggttgctggcgcccatcacggcgtacgcccagcagactagaggcctcctagggtgcataatcaccagcctgaccggcgggacaagaaccaagtggaaggtgaggttcagatcgtgtcaactgctgcccaaaccttcctggcaacgtgcatcaatggggtatgctggactgtctaccacggggccggaacgaggaccatcgcatctccaagggtcctgttatccagatgtataccaatgtagaccaagaccttgtgggctggcccgctcctcaaggctcccgctcactgacaccctgcacctgtggctcctcggatctttacctggtcacgaggcacgccgatgtcttcccgtgcgccggaggggtgatagcaggggcagcctgctttcgccccggcccatttcctacttaaaaggctcctcggggggtccgctgttgtgccccgcgggacacgccgtgggcatatttagggcgcggtgtgcacccgtggagtggctaaggcggtggacttcatccccgtggagaacctagagacaaccatgagatccccggtgttcacggacaactcctccccaccagcagtgccccagagcttccaggtggcccatctgcatctcccaccggcagcggtaagagcaccaaggtcccggccgcgtacgcagctcagggctacaaggtgttagtgctcaacccctctgttgctgcaacattgggttttggcgcttacatgtccaaggcccaggggtcgatcctaatatcaggactggggtgagaacaattaccactggcagccccatcacgtactccacctacggcaagttccttgccgacggcgggtgctcggggggtgcctatgacataataatttgcgacgagtgccatccacagatgccacatccatcttgggcatcggcaccgtccttgaccaagcagagactgcgggagcgagactggttgtgctcgccactgctacccctccgggctccgtcactgtgccccatcctaacatgaggaggttgctctgtccactaccggagagatccccttttacggcaaggctatccccctcgaggtgatcaaggggggaagacatctcatcttctgtcactcaaagaagaagtgcgatgagctcgccgcaaagctggtcgcatgggcgtcaatgccgtggcttactaccgcggtcttgacgtgtttgtcatcccgaccagcggcgacgtcgtcgtcgtggcgactgatgccctcatgactggctataccggcgacttcgactccgtgatgactgcaacacgtgtgtcacccagacagtcgatttcagccttgaccctaccttcaccattgagacaaccacgctcccccaggacgctgtctcccggactcaacgtcggggcaggactggtagggggaagccaggcatctacgatttgtggcaccgggggagcgtccctccggcatgttcgactcatctgtcctctgtgagtgctatgacgcgggctgtgcttggtacgagctcacgcccgccgagactacagttaggctacgagcgtaatgaacaccccggggcttcccgtgtgccaggatcatcttgaattttgggagggcgtctttacgggcctcactcatatagatgcccactttctatcccagacaaagcaaggtggggagaactttccttacctggtagcgtacaagccaccgtgtgcgctagggctcaagcccctcccccatcgtgggaccagatgtggaagtgcttgatccgcctcaagcccaccctccatgggccaacacccctgctatacagactgggtgctgttcaaatgaagtcaccctgacgcacccaatcaccaaatacatcatgacatgcatgtcggctga

SEQ ID NO: 696 - DNA, 4869 bp, Hepatitis C virus
tcgcccacaggacgtcaagttcccgggtggcggtcagatcgttggtggagtttacttgttgccgcgcaggggccctagattgggtgtgcgcgcgacgaggaagacttccgagcggtcgcaacctcgagtagacgtcagcctattcccaaggctcgtcggcccgagggcaggacctgggctcagcccgggtacccttggcccctctatggcaatgagggttgcggttgggcgggatggctcctgtctccccgcggtctcggcctagctggggccccacggacccccggcgcaggtcgcgcaatttgggtaaggtcatcgatacccttacgtgtggcttcgccgatctcatggggtacataccgctcgtcggcgcccctcttggaggcgctgccaggccctggcgcacggcgtccgggttctggaagacggcgtgaattatgcaacagggaatcttcctggttgctctttctctatcttcctcctggccctgctctcttgcttgactgtgcccgcttcagcctacaagtgcgcaactcctcggggctttaccatgtcaccaatgattgccctaactcgagtattgtgtacgaggcgggtgatgccatcctgcacactccggggtgtgtcccttgcgttcgcgagggtaacgcctcgaggtgttggtggcggtgacccccacggtggccaccagggacggcaaactccccacaacgcagcttcggcgccacatcgatctgcttgtcgggagcgccaccctttgctcggccctctacgtgggggacctgtgcggtctgtctttcttgtcggccaactgttcaccttttctcccaggcaccactggacaacgcaagattgcaattgttctatgtatcccggccatataactggtcaccgcatggcatgggatatgatgatgaactggtcccctacgcggcgttggtggtagctcagctgctccggatcccacaagccatcatggacatgatcgctggtgctcactggggagtcctagcgggcatagcgtatttctccatggtggggaactgggcgaaggtcctgtagtgctgctgctatttgccggcgtcgacgcggaaacctacgtcaccgggggaagtgtcggctacaccacgtctgggttcgctagactcttcacaccaggacccagccagaatatccaactgatcaacaccaacggcagcggcacatcaataggacggccttgaactgcaatgatagcctcaacaccggctggatagcagggctcctttatcaccacagattcaactcttcgggctgttccgagaggttggccagctgccgacgcctaccgatttttctcagggctggggccctatcagttatgccaacggaagcgggcccgaccaacggccctactgctggcactaccccccaaaaccttgtagtattgtgtctgcaaagaccgtgtgtggcccagtatattgcttcctcccagccctgtggtggtgggaacgaccgacaggtcgggcgcgcctacctacaactggggtgaaaatgagacggacgtcttcgtccttaacaacaccaggccaccgctgggcaactggtttggttgacctggatgaactcatctggattcaccaaagtgtgtggagcgcccccttgcgtcatcggaggggtgggcaacaacaccttgctctgccccactgactgtttccgcaagcatccggaagccacatactctcggtgcggctccgtccctggatcacacccaggtgcatggtcgactacccatataggctttggcattatccctgtaccatcaactataccagatttaaagtcaggatgtacgtgggaggggtcgagcacaggctggatgcgcctgcaactggacgcggggcgagcgctgtgatctggaagacagggacaggtccgagctcagcccattgctgctgtccaccacacagtggcaagtccttccgtgttctttcacgaccctgccagccttgtccaccggcctctccacctccaccagaacattgtggacgtgcagtacttgtacggagtggggtcaagcatcgcgtcctgggccattaagtgggagtacgtcattctcctgtttcttctgctcgcagacgcgcgcgtctgtcctgcttgtggatgatgttactcatatcccaagcggaggcggctttggagaacctcgtaatactcaatgcagcatccctggccgggacgcacggtctcgtgtccttcctcacgttcttctgctttgcgtggtatctgaaggtaggtgggtgcccggagcggtctacgccctctacgggatgtggcctctcctcctgctcctgttggcgctgcctcaacgagcatacgcactggacacggaggtggccgcgtcgtgtggcggcgcagtcttgtcgggttaatggcgctgactctgtcaccatattataagcgctacatcagcttgtgcttgtggtggcttcagtatcttctgaccagggtggaagcgcaactgcacgtgtgggttccccccctcaacgtccgagggggggcgatgccgtcatcttactcatgtgtgttgtacacccgactttgctatttgacatcaccaaactactgctggccatcttcggacccctttggattctccaagccagtttgctcagagtcccctacttgtgcgcgttcaaggccttctccggatctgcgcgctagcgcggaagatggttggaggtcattacgtgcagatggccatcatcaagttaggggcgcttaccggcacctatgtttataaccacctcactcctcttcgggactggcgcacaacggcctgcgagatctggccgtagctgtggaaccagtcgtcttctcccgaatggagaccaagctcatcacgtggggggcagacaccgccgcgtgcggtgacattatcaacggcttgcccgttccgcccgtaggggccgggagatactgcttggaccagccgacggaatggtctccaaggggtggaggttgctggcgcccatcacggcgtacgcccagcagacgagaggcctcctagggtgcataatcaccagcctgaccggcgggacaaaaaccaagtggaaggtgaggttcagatcgtgtcaactgctgcccaaaccttcctggcaacgtgcatcaatggggtatgctggactgtctaccacggggccggaacgaggaccatcgcatctccaagggtcctgttatccagatgtataccaatgtagaccaagaccttgtgggctggcccgctcctcaaggctcccgctcactgacaccctgcacctgtggctcctcggatctttacctggtcacgaggcacgccgatgtcttcccgtgcgccggcggggtgatagcaggggcagcctgctttcgccccggcccatttcctacttgaaaggctcctcggggggtccgctgttgtgccccgcgggacacgccgtgggcatatttagggcgcggtgtgcacccgtggagtggctaaggcggtggacttcatccccgtggagaacctagagacaaccatgagatccccggtgttcacggacaactcctccccaccagcagtgccccagagcttccaggtggcccatctgcatctcccaccggcagcggtaagagcaccaaggtcccggccgcgtacgcagctcagggctacaaggtgttagtgctcaacccctctgttgctgcaacattgggttttggcgcttacatgtccaaggcccaggggtcgatcctaatatcaggactggggtgagaacaattaccactggcagccccatcacgtactccacctacggcaagttccttgccgacggcgggtgctcggggggtgcctatgacataataatttgcgacgagtgccatccacagatgccacatccatcttgggcatcggcaccgtccttgaccaagcagagactgcgggagcgagactggttgtgctcgccactgctacccctccgggctccgtcactgtgccccatcctaacatgaggaggttgctctgtccactaccggagagatccccttttacggcaaggctatccccctcgaggtgatcaaggggggaagacatctcatcttctgtcactcaaagaagaagtgcgatgagctcgccgcaaagctggtcgcatgggcgtcaatgccgtggcttactaccgcggtcttgacgtgtctgtcatcccgaccagcggcgacgtcgtcgtcgtggcgactgatgccctcatgactggctataccggcgacttcgactccgtgatgactgcaacacgtgtgtcacccagacagtcgatttcagccttgaccctaccttcaccattgagacaaccacgctcccccaggacgctgtctcccggactcaacgtcggggcaggactggtagggggaagccaggcatctacgatttgtggcaccgggggagcgtccctccggcatgttcgactcatctgtcctctgtgagtgctatgacgcgggctgtgcttggtacgagctcacgcccgccgagactacagttaggctacgagcgtaatgaacaccccggggcttcccgtgtgccaggatcatcttgaattttgggagggcgtctttacgggcctcactcatatagatgcccactttctatcccagacaaagcaaggtggggagaactttccttacctggtagcgtacaagccaccgtgtgcgctagggctcaagcccctcccccatcgtgggaccagatgtggaagtgcttgatccgcctcaaacccaccctccatgggccaacacccctgctatacagactgggtgctgttcaaatgaagtcaccctgacgcacccaatcaccaaatacatcatgacatgcatgtcggctga

SEQ ID NO: 697 - DNA, 4869 bp, Hepatitis C virus
tcgcccacaggacgtcaagttcccgggtggcggtcagatcgttggtggagtttacttgttgccgcgcaggggccctagattgggtgtgcgcgcgacgaggaagacttccgagcggtcgcaacctcgagtagacgtcagcctatccccaaggctcgtcggcccgagggcaggacctgggctcagcccgggtacccttggcccctctatggcaatgagggttgcggttgggcgggatggctcctgtctccccgcggtctcggcctagctggggccccacggacccccggcgcaggtcgcgcaatttgggtaaggtcatcgatacccttacgtgtggcttcgccgatctcatggggtacataccgctcgtcggcgcccctcttggaggcgctgccaggccctggcgcacggcgtccgggttctggaagacggcgtgaattatgcaacagggaatcttcctggttgctctttctctatcttcctcctggccctgctctcttgcttgactgtgcccgcttcagcctacaagtgcgcaactcctcggggctttaccatgtcaccaatgattgccctaactcgagtattgtgtacgaggcgggtgatgccatcctgcacactccggggtgtgtcccttgcgttcgcgagggtaacgcctcgaggtgttggtggcggtgacccccacggtggccaccagggacggcaaactccccacaacgcagcttcggcgccacatcgatctgcttgtcgggagcgccaccctttgctcggccctctacgtgggggacctgtgcggtctgtctttcttgtcggccaactgttcaccttttctcccaggcaccactggacaacgcaagattgcaattgttctatgtatcccggccatataactggtcatcgcatggcatgggatatgatgatgaactggtcccctacgcggcgttggtggtagctcagctgctccggatcccacaagccatcatggacatgatcgctggtgctcactggggagtcctagcgggcatagcgtatttctccatggtggggaactgggcgaaggtcctgtagtgctgctgctatttgccggcgtcgacgcggaaacccacgtcaccgggggaagtgtcggctacaccacgtctgggttcgctagactcttcacaccaggacccagccagaatatccaactgatcaacaccaacggcagtggcacatcaataggacggccttgaactgcaatgatagcctcaacaccggctggatagcagggctcatttatcaccacagattcaactcttcgggctgttccgagaggttggccagctgccgacgcctaccgatttttctcagggctggggccctatcagttatgccaacggaagcgggcccgaccaacggccctactgctggcactaccccccaaaaccttgtagtattgtgtctgcaaagaccgtgtgtggcccagtatattgcttcctcccagccctgtggtggtgggaacgaccgacaggtcgggcgcgcctacctacaactggggtgaaaatgagacggacgtcttcgtccttaacaacaccaggccaccgctgggcaactggtttggttgacctggatgaactcatctggattcaccaaagtgtgtggagcgcccccttgcgtcatcggaggggtgggcaacaacaccttgctctgccccactgactgtttccgcaagcatccggaagccacatactctcggtgcggctccgtccctggatcacacccaggtgcatggtcgactacccatataggctttggcattatccctgtaccatcaactataccagatttaaagtcaggatgtacgtgggaggggtcgagcacaggctggatgcgcctgcaactggacgcggggcgagcgctgtgatctggaagacagggacaggtccgagctcagcccattgctgctgtccaccacacagtggcaagtccttccgtgttctttcacgaccctgccagccttgtccaccggcctctccacctccaccagaacattgtggacgtgcagtacttgtacggggtggggtcaagcatcgcgtcctgggccattaagtgggagtacgtcattctcctgtttcttctgctcgcagacgcgcgcgtctgtcctgcttgtggatgatgttactcatatcccaagcggaggcggctttggagaacctcgtaatactcaatgcagcatccctggccgggacgcacggtctcgtgtccttcctcacgttcttctgctttgcgtggtatctgaaggtaggtgggtgcccggagcggtctacgccctctacgggatgtggcctctcctcctgctcctgttggcgctgcctcaacgagcatacgcactggacacggaggtggccgcgtcgtgtggcggcgcagtcttgtcgggttaatggcgctgactctgtcaccatattataagcgctacatcagcttgtgcttgtggtggcttcagtatcttctgaccagggtggaagcgcaactgcacgtgtgggttccccccctcaacgtccgagggggggcgatgccgtcatcttactcatgtgtgttgtacacccgactttgctatttgacatcaccaaactactgctggccatcttcggacccctttggattctccaagccagtttgctcagagtcccctacttgtgcgcgttcaaggccttctccggatctgcgcgctagcgcggaagatggttggaggtcattacgtgcagatggccatcatcaagttaggggcgcttaccggcacctatgtttataaccacctcactcctcttcgggactggcgcacaacggcctgcgagatctggccgtggctgtggaaccagtcgtcttctcccgaatggagaccaagctcatcacgtggggggcagacaccgccgcgtgcggtgacatcatcaacggcttgcccgttccgcccgtaggggccgggagatactgcttggaccagccgacggaatggtctccaaggggtggaggttgctggcgcccatcacggcgtacgcccagcagacgagaggcctcctagggtgcataatcaccagcctgaccggcgggacaagaaccaagtggaaggtgaggttcagatcgtgtcaactgctgcccaaaccttcctggcaacgtgcatcaatggggtatgctggactgtctaccacggggccggaacgaggaccatcgcatctccaagggtcctgttatccagatgtataccaatgtagaccaagaccttgtgggctggcccgctcctcaaggctcccgctcactgacaccctgcacctgtggctcctcggatctctacctggtcacgaggcacgccgatgtcttcccgtgcgccggcggggtgatagcaggggcagcctgctttcgccccggcccatttcctacttgaaaggctcctcggggggtccgctgttgtgccccgcgggacacgccgtgggcatatttagggcgcggtgtgcacccgtggagtggctaaggcggtggacttcatccccgtggagaacctagagacaaccatgagatccccggtgttcacggacaactcctccccaccagcagtgccccagagcttccaggtggcccatctgcatctcccaccggcagcggtaagagcaccaaggtcccggccgcgtacgcagctcagggctacaaggtgttagtgctcaacccctctgttgctgcaacattgggttttggcgcttacatgtccaaggcccaggggtcgatcctaatatcaggactggggtgagaacaattaccactggcagccccatcacgtactccacctacggcaagttccttgccgacggcgggtgctcggggggtgcctatgacataataatttgcgacgagtgccatccacagatgccacatccatcttgggcatcggcaccgtccttgaccaagcagagactgcgggagcgagactggttgtgctcgccactgctacccctccgggctccgtcactgtgccccatcctaacatgaggaggttgctctgtccactaccggagagatccccttttacggcaaggctatccccctcgaggtgatcaaggggggaagacatctcatcttctgtcactcaaagaagaagtgcgatgagctcgccgcaaagctggtcgcatgggcgtcaatgccgtggcttactaccgcggtcttgacgtgtctgtcatcccgaccagcggcgacgtcgtcgtcgtggcgactgatgccctcatgactggctataccggcgacttcgactccgtgatgactgcaacacgtgtgtcacccagacagtcgatttcagccttgaccctaccttcaccattgagacaaccacgctcccccaggacgctgtctcccggactcaacgtcggggcaggactggtagggggaagccaggcatctacgatttgtggcaccgggggagcgtccctccggcatgttcgactcatctgtcctctgtgagtgctatgacgcgggctgtgcttggtacgagctcacgcccgccgagactacagttaggctacgagcgtaatgaacaccccggggcttcccgtgtgccaggatcatcttgaattttgggagggcgtctttacgggcctcactcatatagatgcccactttctatcccagacaaagcaaggtggggagaactttccttacctggtagcgtacaagccaccgtgtgcgctagggctcaagcccctcccccatcgtgggaccagatgtggaagtgcttgatccgcctcaaacccaccctccatgggccaacacccctgctatacagactgggtgctgttcaaatgaagtcaccctgacgcacccaatcaccaaatacatcatgacatgcatgtcggctga

SEQ ID NO: 698 - DNA, 4869 bp, Hepatitis C virus
tcgcccacaggacgtcaagttcccgggtggcggtcagatcgttggtggagtttacttgttgccgcgcaggggccctagattgggtgtgcgcgcgacgaggaagacttccgagcggtcgcaacctcgagtagacgtcagcctatccccaaggctcgtcggcccgagggcaggacctgggctcagcccgggtacccttggcctctctacggcaatgagggttgcggttgggcgggatggctcctgtctccccgcggtctcggcctagctggggccccacagacccccggcgtaggtcgcgcaatttgggtaaggtcatcgataccctcacgtgtggcttcgccgatctcatggggtacataccgctcgtcggcgcccctcttggaggcgctgccaggccctggcgcatggcgtccgggttctggaagacggcgtgaattatgcgacagggaatcttcctggttgctctttctctatcttccttctggccctgctctcttgcctgactgtgcccgcttcagcctacatgtgcgcaactcctcggggctttaccatgtcaccaatgattgccctaactcgagtattgtgtacgaggcgggtgatgccatcctacacactccggggtgtgtcccttgcgttcgcgagggtaacgcctcgaggtgttggtggcggtgacccccacggtggccaccagggacggcaaactccccacaacgcagcttcggcgccatatcgatctgcttgtcgggagcgccaccctttgctcggccctctacgtgggggacctgtgcggtctgtctttcttgtcggccaactgttcaccttttctcccaggcgccactggacgacgcaagattgcaactgttctatgtaccccggccatataacgggtcaccgcatggcatgggatatgatgatgaactggtcccctacgcggcgttggtggtagctcagctgctccggatcccgcaagccatcatggacatgatcgctggtgctcactggggagtcctggcgggcatagcgtatttctccatggtggggaactgggcgaaggtcctgtagtgctgctgctatttgccggcgtcgacgcgggaacccacgtcaccgggggaagcgtcggccgtaccgcgtctgggcttactagtttcttctcaccaggcgccaagcagaatatccaactgatcaacaccaacggcagtggcacatcaatagcacggccttgaactgcaatgatagcctcaacaccggctggatagcagggctcttctattaccacaaattcaactcttcgggctgttccgagaggttggccagctgccgacgcctaccgatttttcccagggctggggccctatcagttacgccaacggaagcgggcccgaccaacggccctactgctggcactaccccccaaaaccttgtggtattgtgtccgcaaagagcgtgtgtggcccagtatattgcttcctcccagccctgtggtggtgggaacgaccgacaagttgggcgcgcctacctacaactggggtggaaaagatacggacgtcttcgtccttaacaacaccaggccaccgttgggcaactggtttggttgacctggatgaactcatctggattcaccaaagtgtgtggggcgcccccctgtgtcatcggaggggtgggcaacaacaccttgctctgccccactgattgtttccgcaagcatccggaagccacatactctcggtgcggctccgtccttggatcacacccaggtgcatggtcgactacccgtataggctttggcattatccttgtaccatcaactacaccatatttaaagtcaggatgtacgtgggaggggtcgagcacaggctggatgcgcctgcaactggacgcggggcgaacgctgtggtctggaagacagggacaggtccgagctcagcccattgctgctgtccaccacacagtggcaagtccttccgtgttctttcacgaccctgccagccttgtccaccggcctctccaccttcaccagaacattgtggacgtgcagtacttgtacggggtggggtcaagcatcgcgtcctgggccgtcaggtgggagtacgtcgttctcctgtttcttctgctcgcagacgcgcgcgtctggcctgtttgtggatgatgttactcatatcccaagcggaggcggccttggagaacctcgtaatgctcaatgcagcatccctggccgggacgcacggtcttgtgtccttcctcgtgttcttctgctttgcgtggtatctgaaggtaggtgggtgcccggagcggtctacgccctctacggaatgtggcctctcctcctgctcctgctggcgctgcctcagcgagcatacgcactggacacggaggtggccgcgtcgtgtggtggcgttgtcttgtcgggttaatggcgctgactctgtcaccatattataagcgctacatcggcttgtgcttgtggtggcttcagtatcttctgaccagggtggaagcgcaactgcacgtgtgggttccccccctcaacgtccgagggggggtgatgccgtcatcttactcatgtgtgctgtatacccgactttggtatttgacatcaccaaactactgctggccatcttcggacccctttggattcttcaagccagtttgctcaaagtcccctacttgtgcgcgttcaaggccttctccggatctgcgcgttagtgcggaagatggttggaggtcattacgtgcagatggctatcatcaagttaggggcgcttaccggcacctatgtttataaccacctcactcctcttcgggactggcgcacaacggcctgcgagatctggccgtggctgtggaaccagtcgtcttctcccgaatggagaccaagctcatcacgtggggggcagacactgccgcgtgcggtgatatcatcagcggcttgcccgttccgcccgtaggggccgggagatactgcttggaccagccgacggaatggtctccaaggggtggagattgctggcgcccatcacggcgtacgcccagcagacgagaggcctcctagggtgcataatcaccagcctgactggcgggacaaaaaccaagtggagggtgaggtccagatcgtgtcaactgctgcccaaaccttcctggcaacgtgcatcaatggggtatgctggactgtctaccacggggccggaacgagaaccatcgcatccccaagggtcctgttatccagatgtataccaatgtggaccaagaccttgtgggctggcccgctcctcatggctcccgctcactgacaccctgcacctgcggctcctcggacctttacctggtcacgaggcatgccgatgtcttcccgtgcgccggcggggcgatagcaggggcagcctgctttcgccccggcccatttcctacttgaaaggctcctcggggggtccgctgttgtgccccgcggggcacgccgtgggcatattcagggcgcggtgtgcacccgtggagtggctaaggcggtggacttcatccccgtggagaacctagagacaaccatgagatccccggtgttcacggacaactcctccccaccagcagtgccccagagcttccaggtggcccacctgcatctcccaccggcagcggtaagagcaccaaggtcccggccgcgtacgcagctcagggctacaaggtgttagtgctcaatccctctgttgctgcaacattgggctttggcgcttacatgtccaaggcccaggggtcgatcctaatatcaggactggggtgagaacaattaccactggcagccccatcacgtattccacctacggcaagttcctcgccgacggcgggtgctcggggggtgcttatgacataataatttgtgatgagtgccacccacggatgccacatctatcttgggcatcggcaccgtccttgaccaagcagagactgcgggagcgagactggttgtgctcgccactgctacccctccgggctccgtcactgtgccccatcctaacatgaggaggttgctctgtccactaccggagagatccccttttacggcaaggctatccccctcgaggtgatcaaggggggaagacatctcatcttctgtcactcaaagaagaagtgcgatgagctcgccgcaaagctggtcgcatgggcgtcaatgccgtggcctattaccgcggtcttgacgtgtctgtcatcccaaccagcggcgacgtcgtcgtcgtggcgactgatgccctcatgactggctataccggcgacttcgactccgtgatgactgcaacacgtgtgtcacccagacagtcgatttcagccttgaccctaccttcaccattgagacaaccacgctcccccaggatgctgtctcccggactcaacgtcggggcaggactggtagggggaagccaggcatctacgatttgtggcaccgggggagcgcccctccggcatgttcgactcgtctgtcctctgcgagtgctatgacgcgggctgtgcttggtatgagctcacgcccgctgagactacggttaggctacgagcgtaatgaacaccccggggcttcccgtgtgccaggatcatcttgaattttgggagggcgtctttacgggcctcactcatatagatgcccactttctatcccagacaaagcaaggtggggagaactttccttacctggtagcgtacaagccaccgtgtgcgctagggctcaagcccctcccccatcgtgggaccagatgtggaagtgcttgatccgcctcaaacccaccctccatgggccaacacccctgctatacagactgggcgctgttcaaatgaagtcaccctgacgcacccaatcaccaaatacatcatgacatgcatgtcggctga

SEQ ID NO: 699 - DNA, 4869 bp, Hepatitis C virus
tcgcccacaggacgtcaagttcccgggtggcggtcagatcgttggtggagtttacttgttgccgcgcaggggccctagattgggtgtgcgcgcgacgaggaagacttccgagcggtcgcaacctcgagtagacgtcagcctatccccaaggctcgtcggcccgagggcaggacctgggctcagcccgggtacccttggcccctctatggcaatgagggttgcggttgggcgggatggctcctgtctccccgcggtctcggcctagctggggccccacggacccccggcgcaggtcgcgcaatttgggtaaggtcatcgatacccttacgtgtggcttcgccgatctcatggggtacataccgctcgtcggcgcccctcttggaggcgctgccaggccctggcgcacggcgtccgggttctggaagacggcgtgaattatgcaacagggaatcttcctggttgctctttctctatcttcctcctggccctgctctcttgcttgactgtgcccgcttcagcctacaagtgcgcaactcctcggggctttaccatgtcaccaatgattgccctaactcgagtattgtgtacgaggcgggtgatgccatcctgcacactccggggtgtgtcccttgcgttcgcgagggtaacgcctcgaggtgttggtggcggtgacccccacggtggccaccagggacggcaaactccccacaacgcagcttcggcgccacatcgatctgcttgtcgggagcgccaccctttgctcggccctctacgtgggggacctgtgcggtctgtctttcttgtcggccaactgttcaccttttctcccaggcaccactggacaacgcaagattgcaattgttctatgtatcccggccatataactggtcaccgcatggcatgggatatgatgatgaactggtcccctacgcggcgttggtggtagctcagctactccggatcccacaagccatcatggacatgatcgctggtgctcactggggagtcctagcgggcatagcgtatttctccatggtggggaactgggcgaaggtcctgtagtgctgctgctatttgccggcgtcgacgcggaaacccacgtcaccgggggaagtgtcggctacaccacgtctgggttcgttagactcttcacaccaggacccagccagaatatccaactgatcaacaccaacggcagtggcacatcaataggacggccttgaactgcaatgatagcctcaacaccggctggatagcagggctcctttatcaccacagattcaactcttcgggctgttccgagaggttggccagctgccgacgcctaccgatttttctcagggctggggccctatcagttatgccaacggaagcgggcccgaccaacggccctactgctggcactaccccccaaaaccttgtagtattgtgtctgcaaggaccgtgtgtggcccagtatattgcttcctcccagccctgtggtggtgggaacgaccgacaggtcgggcgcgcctacctacaactggggtgaaaatgagacggacgtcttcgtccttaacaacaccaggccaccgctgggcaactggtttggttgacctggatgaactcatctggattcaccaaagtgtgtggagcgcccccttgcgtcatcggagggatgggcaacaacaccttgctctgccccactgactgtttccgcaagcatccggaagccacatactctcggtgcggctccgtccctggatcacacccaggtgcatggtcgactacccatataggctttggcattatccctgtaccatcaactataccagatttaaagtcaggatgtacgtgggaggggtcgagcacaggctggatgcgcctgcaactggacgcggggcgagcgctgtgatctggaagacagggacaggtccgagctcagcccattgctgctgtccaccacacagtggcaagtccttccgtgttctttcacgaccctgccagccttgtccaccggcctctccacctccaccagaacattgtggacgtgcagtacttgtacggggtggggtcaagcatcgcgtcctgggccattaagtgggagtacgtcattctcctgtttcttctgctcgcagacgcgcgcgtctgtcctgcttgtggatgatgttactcatatcccaagcggaggcggctttggagaacctcgtaatactcaatgcagcatccctggccgggacgcacggtctcgtgtctttcctcacgttcttctgctttgcgtggtatctgaaggtaggtgggtgcccggagcggtctacgccctctacgggatgtggcctctcctcctgctcctgttggcgctgcctcaacgagcatacgcactggacacggaggtggccgcgtcgtgtggcggcgcagtcttgtcgggttaatggcgctgactctgtcaccatattataagcgctacatcagcttgtgcttgtggtggcttcagtatcttctgaccagggtggaagcgcaactgcacgtgtgggttccccccctcaacgtccgagggggggcgatgccgtcatcttactcatgtgtgttgtacacccgactttgctatttgacatcaccaaactactgctggccatcttcggacccctttggattctccaagccagtttgctcagagtcccctacttgtgcgcgttcaaggccttctccggatctgcgcgctagcgcgggagatggttggaggtcattacgtgcagatggccatcatcaagttaggggcgcttaccggcacctatgtttataaccacctcacccctcttcgggactggcgcacaacggcctgcgagatctggccgtggctgtggaaccagtcgtcttctcccgaatggagaccaagctcatcacgtggggggcagacaccgccgcgtgcggtgacatcatcaacggcttgcccgttccgcccgtaggggccgggagatactgcttggaccagccgacggaatggtttccaaggggtggaggttgctggcgcccatcacggcgtacgcccagcagactagaggcctcctagggtgcataatcaccagcctgaccggcgggacaagaaccaagtggaaggtgaggttcagatcgtgtcaactgctgcccaaaccttcctggcaacgtgcatcaatggggtatgctggactgtctaccacggggccggaacgaggaccatcgcatctccaagggtcctgttatccagatgtataccaatgtagaccaagaccttgtgggctggcccgctcctcaaggctcccgctcactgacaccctgcacctgtggctcctcggatctttacctggtcacgaggcacgccgatgtcttcccgtgcgccggaggggtgatagcaggggcagcctgctttcgccccggcccatttcctacttaaaaggctcctcggggggtccgctgttgtgccccgcgggacacgccgtgggcatatttagggcgcggtgtgcacccgtggagtggctaaggcggtggacttcatccccgtggagaacctagagacaaccatgagatccccggtgttcacggacaactcctccccaccagcagtgccccagagcttccaggtggcccatctgcatctcccaccggcagcggtaagagcaccaaggtcccggccgcgtacgcagctcagggctacaaggtgttagtgctcaacccctctgttgctgcaacattgggttttggcgcttacatgtccaaggcccaggggtcgatcctaatatcaggactggggtgagaacaattaccactggcagccccatcacgtactccacctacggcaagttccttgccgacggcgggtgctcggggggtgcctatgacataataatttgcgacgagtgccatccacagatgccacatccatcttgggcatcggcaccgtccttgaccaagcagagactgcgggagcgagactggttgtgctcgccactgctacccctccgggctccgtcactgtgccccatcctaacatgaggaggttgctctgtccactaccggagagatccccttttacggcaaggctatccccctcgaggtgatcaaggggggaagacatctcatcttctgtcactcaaagaagaagtgcgatgagctcgccgcaaagctggtcgcatgggcgtcaatgccgtggcttactaccgcggtcttgacgtgtctgtcatcccgaccagcggcgacgtcgtcgtcgtggcgactgatgccctcatgactggctataccggcgacttcgactccgtgatgactgcaacacgtgtgtcacccagacagtcgatttcagccttgaccctaccttcaccattgagacaaccacgctcccccaggacgctgtctcccggactcaacgtcggggcaggactggtagggggaagccaggcatctacgatttgtggcaccgggggagcgtccctccggcatgttcgactcatctgtcctctgtgagtgctatgacgcgggctgtgcttggtacgagctcacgcccgccgagactacagttaggctacgagcgtaatgaacaccccggggcttcccgtgtgccaggatcatcttgaattttgggagggcgtctttacgggcctcactcatatagatgcccactttctatcccagacaaagcaaggtggggagaactttccttacctggtagcgtacaagccaccgtgtgcgctagggctcaagcccctcccccatcgtgggaccagatgtggaagtgcttgatccgcctcaagcccaccctccatgggccaacacccctgctatacagactgggtgctgttcaaatgaagtcaccctgacgcacccaatcaccaaatacatcatgacatgcatgtcggctga

SEQ ID NO: 700 - DNA, 4869 bp, Hepatitis C virus
tcgcccacaggacgtcaagttcccgggtggcggtcagatcgttggtggagtttacttgttgccgcgcaggggccctagattgggtgtgcgcgcgacgaggaagacttccgagcggtcgcaacctcgagtagacgtcagcctatccccaaggctcgtcggcccgagggcaggacctgggctcagcccgggtacccttggcccctctatggcaatgagggttgcggttgggcgggatggctcctgtctccccgcggtctcggcctagctggggccccacggacccccggcgcaggtcgcgcaatttgggtaaggtcatcgatacccttacgtgtggcttcgccgatctcatggggtacataccgctcgtcggcgcccctcttggaggcgctgccaggccctggcgcacggcgtccgggttctggaagacggcgtgaattatgcaacagggaatcttcctggttgctctttctctatcttcctcctggccctgctctcttgcttgactgtgcccgcttcagcctacaagtgcgcaactcctcggggctttaccatgtcaccaatgattgccctaactcgagtattgtgtacgaggcgggtgatgccatcctgcacactccggggtgtgtcccttgcgttcgcgagggtaacgcctcgaggtgttggtggcggtgacccccacggtggccaccagggacggcaaactccccacaacgcagcttcggcgccacatcgatctgcttgtcgggagcgccaccctttgctcggccctctacgtgggggacctgtgcggtctgtctttcttgtcggccaactgttcaccttttctcccaggcaccactggacaatgcaagattgcaattgttctatgtatcccggccatataactggtcaccgcatggcatgggatatgatgatgaactggtcccctacgcggcgttggtggtagctcagctactccggatcccacaagccatcatggacatgatcgctggtgctcactggggagtcctagcgggcatagcgtatttctccatggtggggaactgggcgaaggtcctgtagtgctgctgctatttgccggcgtcgacgcggaaacccacgtcaccgggggaagtgtcggctacaccacgtctgggttcgttagactcttcacaccaggacccagccagaatatccaactgatcaacaccaacggcagtggcacatcaataggacggccttgaactgcaatgatagcctcaacaccggctggatagcagggctcctttatcaccacagattcaactcttcgggctgttccgagaggttggccagctgccgacgcctaccgatttttctcagggctggggccctatcagttatgccaacggaagcgggcccgaccaacggccctactgctggcactaccccccaaaaccttgtagtattgtgtctgcaaggactgtgtgtggcccagtatattgcttcctcccagccctgtggtggtgggaacgaccgacaggtcgggcgcgcctacctacaactggggtgaaaatgagacggacgtcttcgtccttaacaacaccaggccaccgctgggcaactggtttggttgacctggatgaactcatctggattcaccaaagtgtgtggagcgcccccttgcgtcatcggaggggtgggcaacaacaccttgctctgccccactgactgtttccgcaagcatccggaagccacatactctcggtgcggctccgtccctggatcacacccaggtgcatggtcgactacccatataggctttggcattatccctgtaccatcaactataccagatttaaagtcaggatgtacgtgggaggggtcgagcacaggctggatgcgcctgcaactggacgcggggcgagcgctgtgatctggaagacagggacaggtccgagctcagcccattgctgctgtccaccacacagtggcaagtccttccgtgttctttcacgaccctgccagccttgtccaccggcctctccacctccaccagaacattgtggacgtgcagtacttgtacggggtggggtcaagcatcgcgtcctgggccattaagtgggagtacgtcattctcctgtttcttctgctcgcagacgcgcgcgtctgtcctgcttgtggatgatgttactcatatcccaagcggaggcggctttggagaacctcgtaatactcaatgcagcatccctggccgggacgcacggtctcgtgtctttcctcacgttcttctgctttgcgtggtatctgaaggtaggtgggtgcccggagcggtctacgccctctacgggatgtggcctctcctcctgctcctgttggcgctgcctcaacgagcatacgcactggacacggaggtggccgcgtcgtgtggcggcgcagtcttgtcgggttaatggcgctgactctgtcaccatattataagcgctacatcagcttgtgcttgtggtggcttcagtatcttctgaccagggtggaagcgcaactgcacgtgtgggttccccccctcaacgtccgagggggggcgatgccgtcatcttactcatgtgtgttgtacacccgactttgctatttgacatcaccaaactactgctggccatcttcggacccctttggattctccaagccagtttgctcagagtcccctacttgtgcgcgttcaaggccttctccggatctgcgcgctagcgcgggagatggttggaggtcattacgtgcagatggccatcatcaagttaggggcgcttaccggcacctatgtttataaccacctcacccctcttcgggactggcgcacaacggcctgcgagatctggccgtggctgtggaaccagtcgtcttctcccgaatggagaccaagctcatcacgtggggggcagacaccgccgcgtgcggtgacatcatcaacggcttgcccgttccgcccgtaggggccgggagatactgcttggaccagccgacggaatggtttccaaggggtggaggttgctggcgcccatcacggcgtacgcccagcagactagaggcctcctagggtgcataatcaccagcctgaccggcgggacaagaaccaagtggaaggtgaggttcagatcgtgtcaactgctgcccaaaccttcctggcaacgtgcatcaatggggtatgctggactgtctaccacggggccggaacgaggaccatcgcatctccaagggtcctgttatccagatgtataccaatgtagaccaagaccttgtgggctggcccgctcctcaaggctcccgctcactgacaccctgcacctgtggctcctcggatctttacctggtcacgaggcacgccgatgtcttcccgtgcgccggaggggtgatagcaggggcagcctgctttcgccccggcccatttcctacttaaaaggctcctcggggggtccgctgttgtgccccgcgggacacgccgtgggcatatttagggcgcggtgtgcacccgtggagtggctaaggcggtggacttcatccccgtggagaacctagagacaaccatgagatccccggtgttcacggacaactcctccccaccagcagtgccccagagcttccaggtggcccatctgcatctcccaccggcagcggtaagagcaccaaggtcccggccgcgtacgcagctcagggctacaaggtgttagtgctcaacccctctgttgctgcaacattgggttttggcgcttacatgtccaaggcccaggggtcgatcctaatatcaggactggggtgagaacaattaccactggcagccccatcacgtactccacctacggcaagttccttgccgacggcgggtgctcggggggtgcctatgacataataatttgcgacgagtgccatccacagatgccacatccatcttgggcatcggcaccgtccttgaccaagcagagactgcgggagcgagactggttgtgctcgccactgctacccctccgggctccgtcactgtgccccatcctaacatgaggaggttgctctgtccactaccggagagatccccttttacggcaaggctatccccctcgaggtgatcaaggggggaagacatctcatcttctgtcactcaaagaagaagtgcgatgagctcgccgcaaagctggtcgcatgggcgtcaatgccgtggcttactaccgcggtcttgacgtgtctgtcatcccgaccagcggcgacgtcgtcgtcgtggcgactgatgccctcatgactggctataccggcgacttcgactccgtgatgactgcaacacgtgtgtcacccagacagtcgatttcagccttgaccctaccttcaccattgagacaaccacgctcccccaggacgctgtctcccggactcaacgtcggggcaggactggtagggggaagccaggcatctacgatttgtggcaccgggggagcgtccctccggcatgttcgactcatctgtcctctgtgagtgctatgacgcgggctgtgcttggtacgagctcacgcccgccgagactacagttaggctacgagcgtaatgaacaccccggggcttcccgtgtgccaggatcatcttgaattttgggagggcgtctttacgggcctcactcatatagatgcccactttctatcccagacaaagcaaggtggggagaactttccttacctggtagcgtacaagccaccgtgtgcgctagggctcaagcccctcccccatcgtgggaccagatgtggaagtgcttgatccgcctcaagcccaccctccatgggccaacacccctgctatacagactgggtgctgttcaaatgaagtcaccctgacgcacccaatcaccaaatacatcatgacatgcatgtcggctga

SEQ ID NO: 701 - DNA, 4869 bp, Hepatitis C virus
tcgcccacaggacgtcaagttcccgggtggcggtcagatcgttggtggagtttacttgttgccgcgcaggggccctagattgggtgtgcgcgcgacgaggaagacttccgagcggtcgcaacctcgagtagacgtcagcctatccccaaggctcgtcggcccgagggcaggacctgggctcagcccgggtacccttggcccctctatggcaatgagggttgcggttgggcgggatggctcctgtctccccgcggtctcggcctagctggggccccacggacccccggcgcaggtcgcgcaatttgggtaaggtcatcgatacccttacgtgtggcttcgccgatctcatggggtacataccgctcgtcggcgcccctcttggaggcgctgccaggccctggcgcacggcgtccgggttctggaagacggcgtgaattatgcaacagggaatcttcctggttgctctttctctatcttcctcctggccctgctctcttgcttgactgtgcccgcttcagcctacaagtgcgcaactcctcggggctttaccatgtcaccaatgattgccctaactcgagtattgtgtacgaggcgggtgatgccatcctgcacactccggggtgtgtcccttgcgttcgcgagggtaacgcctcgaggtgttggtggcggtgacccccacggtggccaccagggacggcaaactccccacaacgcagcttcggcgccacatcgatctgcttgtcgggagcgccaccctttgctcggccctctacgtgggggacctgtgcggtctgtctttcttgtcggccaactgttcaccttttctcccaggcaccactggacaacgcaagattgcaattgttctatgtatcccggccatataactggtcaccgcatggcatgggatatgatgatgaactggtcccctacgcggcgttggtggtagctcagctactccggatcccacaagccatcatggacatgatcgctggtgctcactggggagtcctagcgggcatagcgtatttctccatggtggggaactgggcgaaggtcctgtagtgctgctgctatttgccggcgtcgacgcggaaacccacgtcaccgggggaagtgtcggctacaccacgtctgggttcgttagactcttcacaccaggacccagccagaatatccaactgatcaacaccaacggcagtggcacatcaataggacggccttgaactgcaatgatagcctcaacaccggctggatagcagggctcctttatcaccacagattcaactcttcgggctgttccgagaggttggccagctgccgacgcctaccgatttttctcagggctggggccctatcagttatgccaacggaagcgggcccgaccaacggccctactgctggcactaccccccaaaaccttgtagtattgtgtctgcaaggaccgtgtgtggcccagtatattgcttcctcccagccctgtggtggtgggaacgaccgacaggtcgggcgcgcctacctacaactggggtgaaaatgagacggacgtcttcgtccttaacaacaccaggccaccgctgggcaactggtttggttgacctggatgaactcatctggattcaccaaagtgtgtggagcgcccccttgcgtcatcggaggggtgggcaacaacaccttgctctgccccactgactgtttccgcaagcatccggaagccacatactctcggtgcggctccgtccctggatcacacccaggtgcatggtcgactacccatataggctttggcattatccctgtaccatcaactataccagatttaaagtcaggatgtacgtgggaggggtcgagcacaggctggatgcgcctgcaactggacgcggggcgagcgctgtgatctggaagacagggacaggtccgagctcagcccattgctgctgtccaccacacagtggcaagtccttccgtgttctttcacgaccctgccagccttgtccaccggcctctccacctccaccagaacattgtggacgtgcagtacttgtacggggtggggtcaagcatcgcgtcctgggccattaagtgggagtacgtcattctcctgtttcttctgctcgcagacgcgcgcgtctgtcctgcttgtggatgatgttactcatatcccaagcggaggcggctttggagaacctcgtaatactcaatgcagcatccctggccgggacgcacggtctcgtgtctttcctcacgttcttctgctttgcgtggtatctgaaggtaggtgggtgcccggagcggtctacgccctctacgggatgtggcctctcctcctgctcctgttggcgctgcctcaacgagcatacgcactggacacggaggtggccgcgtcgtgtggcggcgcagtcttgtcgggttaatggcgctgactctgtcaccatattataagcgctacatcagcttgtgcttgtggtggcttcagtatcttctgaccagggtggaagcgcaactgcacgtgtgggttccccccctcaacgtccgagggggggcgatgccgtcatcttactcatgtgtgttgtacacccgactttgctatttgacatcaccaaactactgctggccatcttcggacccctttggattctccaagccagtttgctcagagtcccctacttgtgcgcgttcaaggccttctccggatctgcgcgctagcgcgggagatggttggaggtcattacgtgcagatggccatcatcaagttaggggcgcttaccggcacctatgtttataaccacctcacccctcttcgggactggcgcacaacggcctgcgagatctggccgtggctgtggaaccagtcgtcttctcccgaatggagaccaagctcatcacgtggggggcagacaccgccgcgtgcggtgacatcatcaacggcttgcccgttccgcccgtaggggccgggagatactgcttggaccagccgacggaatggtttccaaggggtggaggttgctggcgcccatcacggcgtacgcccagcagactagaggcctcctagggtgcataatcaccagcctgaccggcgggacaagaaccaagtggaaggtgaggttcagatcgtgtcaactgctgcccaaaccttcctggcaacgtgcatcaatggggtatgctggactgtctaccacggggccggaacgaggaccatcgcatctccaagggtcctgttatccagatgtataccaatgtagaccaagaccttgtgggctggcccgctcctcaaggctcccgctcactgacaccctgcacctgtggctcctcggatctttacctggtcacgaggcacgccgatgtcttcccgtgcgccggaggggtgatagcaggggcagcctgctttcgccccggcccatttcctacttaaaaggctcctcggggggtccgctgttgtgccccgcgggacacgccgtgggcatatttagggcgcggtgtgcacccgtggagtggctaaggcggtggacttcatccccgtggagaacctagagacaaccatgagatccccggtgttcacggacaactcctccccaccagcagtgccccagagcttccaggtggcccatctgcatctcccaccggcagcggtaagagcaccaaggtcccggccgcgtacgcagctcagggctacaaggtgttagtgctcaacccctctgttgctgcaacattgggttttggcgcttacatgtccaaggcccaggggtcgatcctaatatcaggactggggtgagaacaattaccactggcagccccatcacgtactccacctacggcaagttccttgccgacggcgggtgctcggggggtgcctatgacataataatttgcgacgagtgccatccacagatgccacatccatcttgggcatcggcaccgtccttgaccaagcagagactgcgggagcgagactggttgtgctcgccactgctacccctccgggctccgtcactgtgccccatcctaacatgaggaggttgctctgtccactaccggagagatccccttttacggcaaggctatccccctcgaggtgatcaaggggggaagacatctcatcttctgtcactcaaagaagaagtgcgatgagctcgccgcaaagctggtcgcatgggcgtcaatgccgtggcttactaccgcggtcttgacgtgtctgtcatcccgaccagcggcgacgtcgtcgtcgtggcgactgatgccctcatgactggctataccggcgacttcgactccgtgatgactgcaacacgtgtgtcacccagacagtcgatttcagccttgaccctaccttcaccattgagacaaccacgctcccccaggacgctgtctcccggactcaacgtcggggcaggactggtagggggaagccaggcatctacgatttgtggcaccgggggagcgtccctccggcatgttcgactcatctgtcctctgtgagtgctatgacgcgggctgtgcttggtacgagctcacgcccgccgagactacagttaggctacgagcgtaatgaacaccccggggcttcccgtgtgccaggatcatcttgaattttgggagggcgtctttacgggcctcactcatatagatgcccactttctatcccagacaaagcaaggtggggagaactttccttacctggtagcgtacaagccaccgtgtgcgctagggctcaagcccctcccccatcgtgggaccagatgtggaagtgcttgatccgcctcaagcccaccctccatgggccaacacccctgctatacagactgggtgctgttcaaatgaagttaccctgacgcacccaatcaccaaatacatcatgacatgcatgtcggctga

SEQ ID NO: 702 - DNA, 4869 bp, Hepatitis C virus
tcgcccacaggacgtcaagttcccgggtggcggtcagatcgttggtggagtttacttgttgccgcgcaggggccctagattgggtgtgcgcgcgacgaggaagacttccgagcggtcgcaacctcgagtagacgtcagcctatccccaaggctcgtcggcccgagggcaggacctgggctcagcccgggtacccttggcctctctacggcaatgagggttgcggttgggcgggatggctcctgtctccccgcggtctcggcctagctggggccccacagacccccggcgtaggtcgcgcaatttgggtaaggtcatcgataccctcacgtgtggcttcgccgatctcatggggtacataccgctcgtcggcgcccctcttggaggcgctgccaggccctggcgcatggcgtccgggttctggaagacggcgtgaattatgcaacagggaatcttcctggttgctctttctctatcttccttctggccctgctctcttgcttgactgtgcccgcttcagcctacatgtgcgcaactcctcggggctttaccatgtcaccaatgattgccctaactcgagtattgtgtacgaggcgggtgatgccatcctacacactccggggtgtgtcccttgcgttcgcgagggtaacgcctcgaggtgttggtggcggtgacccccacggtggccaccagggacggcaaactccccacaacgcagcttcggcgccacatcgatctgcttgtcgggagcgccaccctttgctcggccctctacgtgggggacctgtgcggtctgtctttcttgtcggccaactgttcaccttttctcccaggcgccactggacgacgcaagattgcaactgttctatgtatcccggccatataacgggtcaccgcatggcatgggatatgatgatgaactggtcccctacgcggcgttggtggtagctcagctgctccggatcccgcaagccatcatggacatgatcgctggtgctcactggggagtcctggcgggcatagcgtatttctccatggtggggaactgggcgaaggtcctgtagtgctgctgctatttgccggcgtcgacgcgggaacccacgtcaccgggggaagcgtcggccgtaccgcgtctgggcttactagttttttctcaccaggcgccaagcagaatatccaactgatcaacaccaacggcagtggcacatcaatagcacggccttgaactgcaatgatagcctcaacaccggctggatagcagggctcttctattaccacaaattcaactcttcgggctgttccgagaggttggccagctgccgacgcctaccgatttttcccagggctggggccctatcagttacgccaacggaagcgggcccgaccaacggccctactgctggcactaccccccaaaaccttgtggtattgtgtccgcaaagagcgtgtgtggcccagtatattgcttcctcccagccctgtggtggtgggaacgaccgacaagttgggcgcgcctacctacaactggggtggaaaagatacggacgtcttcgtccttaacaacaccaggccaccgttgggcaactggtttggttgacctggatgaactcatctggattcaccaaagtgtgtggggcgcccccctgtgtcatcggaggggtgggcaacaacaccttgctctgccccactgattgtttccgcaagcatccggaagccacatactctcggtgcggctccgtccttggatcacacccaggtgcatggtcgactacccgtataggctttggcattatccttgtaccatcaactacaccatatttaaagtcaggatgtacgtgggaggggtcgagcacaggctggatgcgcctgcaactggacgcggggcgaacgctgtggtctggaagacagggataggtccgagctcagcccattgctgctgtccaccacacagtggcaagtccttccgcgttctttcacgaccctgccagccttgtccaccggcctctccaccttcaccagaacattgtggacgtgcagtacttgtacggggtggggtcaagcatcgcgtcctgggccgtcaggtgggagtacgtcgttctcctgtttcttctgctcgcagacgcgcgcgtctggcctgcttgtggatgatgttactcatatcccaagcggaggcggccttggagaacctcgtaatgctcaatgcagcatccctggccgggacgcacggtcttgtgtccttcctcgtgttcttctgctttgcgtggtatctgaaggtaggtgggtgcccggagcggtctacgccctctacggaatgtggcctctcctcctgctcctgctggcgctgcctcagcgagcatacgcactggacacggaggtggccgcgtcgtgtggcggcgttgtcttgtcgggttaatggcgctgactctgtcaccatattataagcgctacatcggcttgtgcttgtggtggcttcagtatcttctgaccagggtggaagcgcaactgcacgtgtgggttccccccctcaacgtccgagggggggtgatgccgtcatcttactcatgtgtgctgtatacccgactttggtatttgacatcaccaaactactgctggccatcttcggacccctttggattcttcaagccagtttgctcaaagtcccctacttgtgcgcgttcaaggccttctccggatctgcgcgttagtgcggaagatggttggaggtcattacgtgcagatggctatcatcaagttaggggcgcttaccggcacctatgtttataaccacctcactcctcttcgggactggcgcacaacggcctgcgagatctggccgtggctgtggaaccagtcatcttctcccgaatggagaccaagctcatcacgtggggggcagacactgccgcgtgcggtgatatcatcagcggcttgcccgttccgcccgtaggggccgggagatactgcttggaccagccgacggaatggtctccaaggggtggagattgctggcgcccatcacggcgtacgcccagcagacgagaggcctcctagggtgcataatcaccagcctgactggcgggacaagaaccaagtggagggtgaggtccagatcgtgtcaactgctgcccaaaccttcctggcaacgtgcatcaatggggtatgctggactgtctaccacggggccggaacgagaaccatcgcatccccaagggtcctgttatccagatgtataccaatgtggaccaagaccttgtgggctggcccgctcctcagggctcccgctcactgacaccctgcacctgcggctcctcggacctttacctggtcacgaggcatgccgatgtcttcccgtgcgccggcggggtgatagcaggggcagcctgctttcaccccggcccatttcctacttgaaaggctcctcggggggtccgctgttgtgccccgcggggcacgccgtgggcatattcagggcgcggtgtgcacccgtggagtggctaaggcggtggacttcatccccgtggagaacctagagacaaccatgagatccccggtgttcacggacaactcctccccaccagcagtgccccagagcttccaggtggcccacctgcatctcccaccggcagcggtaagagcaccaaggtcccggccgcgtacgcagctcagggctacaaggtgttagtgctcaatccctctgttgctgcaacattgggctttggcgcttacatgtccaaggcccaggggtcgatcctaatatcaggactggggtgagaacaattaccactggcagccccatcacgtattccacctacggcaagttcctcgccgacggcgggtgctcggggggtgcttatgacataataatttgtgatgagtgccacccacggatgccacatctatcttgggcatcggcaccgtccttgaccaagcagagactgcgggagcgagactggttgtgctcgccactgctacccctccgggctccgtcactgtgccccatcctaacatgaggaggttgctctgtccactaccggagagatccccttttacggcaaggctatccccctcgaggtgatcaaggggggaagacatctcatcttctgtcactcaaagaagaagtgcgatgagctcgccgcaaagctggtcgcatgggcgtcaatgccgtggcctactaccgcggtcttgacgtgtctgtcatcccaaccagcggcgacgtcgtcgtcgtggcgactgatgccctcatgactggctataccggcgacttcgactccgtgatgactgcaacacgtgtgtcacccagacagtcgatttcagccttgaccctaccttcaccattgagacaaccacgctcccccaggatgctgtctcccggactcaacgtcggggcaggactggtagggggaagccaggcatctacgatttgtggcaccgggggagcgcccctccggcatgttcgactcgtctgtcctctgcgagtgctatgacgcgggctgtgcttggtatgagctcacgcccgctgagactacggttaggctacgagcgtaatgaacaccccggggcttcccgtgtgccaggatcatcttgaattttgggagggcgtctttacgggcctcactcatatagatgcccactttctatcccagacaaagcaaggtggggagaactttccttacctggtagcgtacaagccaccgtgtgcgctagggctcaagcccctcccccatcgtgggaccagatgtggaagtgcttgatccgcctcaaacccaccctccatgggccaacacccctgctatacagactgggcgctgttcaaatgaagtcaccctgacgcacccaatcaccaaatacatcatgacatgcatgtcggctga

SEQ ID NO: 703 - DNA, 4869 bp, Hepatitis C virus
tcgcccacaggacgtcaagttcccgggtggcggtcagatcgttggtggagtttacttgttgccgcgcaggggccctagattgggtgtgcgcgcgacgaggaagacttccgagcggtcgcaacctcgagtagacgtcagcctatccccaaggctcgtcggcccgagggcaggacctgggctcagcccgggtacccttggcctctctacggcaatgagggttgcggttgggcgggatggctcctgtctccccgcggtctcggcctagctggggccccacagacccccggcgtaggtcgcgcaatttgggtaaggtcatcgataccctcacgtgtggcttcgccgatctcatggggtacataccgctcgtcggcgcccctcttggaggcgctgccaggccctggcgcatggcgtccgggttctggaagacggcgtgaattatgcaacagggaatcttcctggttgctctttctctatcttccttctggccctgctctcttgcttgactgtgcccgcttcagcctacatgtgcgcaactcctcggggctttaccatgtcaccaatgattgccctaactcgagtattgtgtacgaggcgggtgatgccatcctacacactccggggtgtgtcccttgcgttcgcgagggtaacgcctcgaggtgttggtggcggtgacccccacggtggccaccagggacggcaaactccccacaacgcagcttcggcgccacatcgatctgcttgtcgggagcgccaccctttgctcggccctctacgtgggggacctgtgcggtctgtctttcttgtcggccaactgttcaccttttctcccaggcgccactggacgacgcaagattgcaactgttctatgtatcccggccatataacgggtcaccgcatggcatgggatatgatgatgaactggtcccctacgcggcgttggtggtagctcagctgctccggatcccgcaagccatcatggacatgatcgctggtgctcactggggagtcctggcgggcatagcgtatttctccatggtggggaactgggcgaaggtcctgtagtgctgctgctatttgccggcgtcgacgcgggaacccacgtcaccgggggaagcgtcggccgtaccgcgtctgggcttactagttttttctcaccaggcgccaagcagaatatccaactgatcaacaccaacggcagtggcacatcaatagcacggccttgaactgcaatgatagcctcaacaccggctggatagcagggctcttctattaccacaaattcaactcttcgggctgttccgagaggttggccagctgccgacgcctaccgatttttcccagggctggggccctatcagttacgccaacggaagcgggcccgaccaacggccctactgctggcactaccccccaaaaccttgtggtattgtgtccgcaaagagcgtgtgtggcccagtatattgcttcctcccagccctgtggtggtgggaacgaccgacaagttgggcgcgcctacctacaactggggtggaaaagatacggacgtcttcgtccttaacaacaccaggccaccgttgggcaactggtttggttgacctggatgaactcatctggattcaccaaagtgtgtggggcgcccccctgtgtcatcggaggggtgggcaacaacaccttgctctgccccactgattgtttccgcaagcatccggaagccacatactctcggtgcggctccgtccttggatcacacccaggtgcatggtcgactacccgtataggctttggcattatccttgtaccatcaactacaccatatttaaagtcaggatgtacgtgggaggggtcgagcacaggctggatgcgcctgcaactggacgcggggcgaacgctgtggtctggaagacagggataggtccgagctcagcccattgctgctgtccaccacacagtggcaagtccttccgtgttctttcacgaccctgccagccttgtccaccggcctctccaccttcaccagaacattgtggacgtgcagtacttgtacggggtggggtcaagcatcgcgtcctgggccgtcaggtgggagtacgtcgttctcctgtttcttctgctcgcagacgcgcgcgtctggcctgcttgtggatgatgttactcatatcccaagcggaggcggccttggagaacctcgtaatgctcaatgcagcatccctggccgggacgcacggtcttgtgtccttcctcgtgttcttctgctttgcgtggtatctgaaggtaggtgggtgcccggagcggtctacgccctctacggaatgtggcctctcctcctgctcctgctggcgctgcctcagcgagcatacgcactggacacggaggtggccgcgtcgtgtggcggcgttgtcttgtcgggttaatggcgctgactctgtcaccatattataagcgctacatcggcttgtgcttgtggtggcttcagtatcttctgaccagggtggaagcgcaactgcacgtgtgggttccccccctcaacgtccgagggggggtgatgccgtcatcttactcatgtgtgctgtatacccgactttggtatttgacatcaccaaactactgctggccatcttcggacccctttggattcttcaagccagtttgctcaaagtcccctacttgtgcgcgttcaaggccttctccggatctgcgcgttagtgcggaagatggttggaggtcattacgtgcagatggctatcatcaagttaggggcgcttaccggcacctatgtttataaccacatcactcctcttcgggactggcgcacaacggcctgcgagatctggccgtggctgtggaaccagtcatcttctcccgaatggagaccaagctcatcacgtggggggcagacactgccgcgtgcggtgatatcatcagcggcttgcccgttccgcccgtaggggccgggagatactgcttggaccagccgacggaatggtctccaaggggtggagattgctggcgcccatcacggcgtacgcccagcagacgagaggcctcctagggtgcataatcaccagcctgactggcgggacaagaaccaagtggagggtgaggtccagatcgtgtcaactgctgcccaaaccttcctggcaacgtgcatcaatggggtatgctggactgtctaccacggggccggaacgagaaccatcgcatccccaagggtcctgttatccagatgtataccaatgtggaccaagaccttgtgggctggcccgctcctcagggctcccgctcactgacaccctgcacctgcggctcctcggacctttacctggtcacgaggcatgccgatgtcttcccgtgcgccggcggggtgatagcaggggcagcctgctttcaccccggcccatttcctacttgaaaggctcctcggggggtccgctgttgtgccccgcggggcacgccgtgggcatattcagggcgcggtgtgcacccgtggagtggctaaggcggtggacttcatccccgtggagaacctagagacaaccatgagatccccggtgttcacggacaactcctccccaccagcagtgccccagagcttccaggtggcccacctgcatctcccaccggcagcggtaagagcaccaaggtcccggccgcgtacgcagctcagggctacaaggtgttagtgctcaatccctctgttgctgcaacattgggctttggcgcttacatgtccaaggcccaggggtcgatcctaatatcaggactggggtgagaacaattaccactggcagccccatcacgtattccacctacggcaagttcctcgccgacggcgggtgctcggggggtgcttatgacataataatttgtgatgagtgccacccacggatgccacatctatcttgggcatcggcaccgtccttgaccaagcagagactgcgggagcgagactggttgtgctcgccactgctacccctccgggctccgtcactgtgccccatcctaacatgaggaggttgctctgtccactaccggagagatccccttttacggcaaggctatccccctcgaggtgatcaaggggggaagacatctcatcttctgtcactcaaagaagaagtgcgatgagctcgccgcaaagctggtcgcatgggcgtcaatgccgtggcctactaccgcggtcttgacgtgtctgtcatcccaaccagcggcgacgtcgtcgtcgtggcgactgatgccctcatgactggctataccggcgacttcgactccgtgatgactgcaacacgtgtgtcacccagacagtcgatttcagccttgaccctaccttcaccattgagacaaccacgctcccccaggatgctgtctcccggactcaacgtcggggcaggactggtagggggaagccaggcatctacgatttgtggcaccgggggagcgcccctccggcatgttcgactcgtctgtcctctgcgagtgctatgacgcgggctgtgcttggtatgagctcacgcccgctgagactacggttaggctacgagcgtaatgaacaccccggggcttcccgtgtgccaggatcatcttgaattttgggagggcgtctttacgggcctcactcatatagatgcccactttctatcccagacaaagcaaggtggggagaactttccttacctggtagcgtacaagccaccgtgtgcgctagggctcaagcccctcccccatcgtgggaccagatgtggaagtgcttgatccgcctcaaacccaccctccatgggccaacacccctgctatacagactgggcgctgttcaaatgaagtcaccctgacgcacccaatcaccaaatacatcatgacatgcatgtcggctga

SEQ ID NO: 704 - DNA, 4869 bp, Hepatitis C virus
tcgcccacaggacgtcaagttcccgggtggcggtcagatcgttggtggagtttacttgttgccgcgcaggggccctagattgggtgtgcgcgcgacgaggaagacttccgagcggtcgcaacctcgagtagacgtcagcctatccccaaggctcgtcggcccgagggcaggacctgggctcagcccgggtacccttggcctctctacggcaatgagggttgcggttgggcgggatggctcctgtctccccgcggtctcggcctagctggggccccacagacccccggcgtaggtcgcgcaatttgggtaaggtcatcgataccctcacgtgtggcttcgccgatctcatggggtacataccgctcgtcggcgcccctcttggaggcgctgccaggccctggcgcatggcgtccgggttctggaagacggcgtgaattatgcaacagggaatcttcctggttgctctttctctatcttccttctggccctgctctcttgcttgactgtgcccgcttcagcctacatgtgcgcaactcctcggggctttaccatgtcaccaatgattgccctaactcgagtattgtgtacgaggcgggtgatgccatcctacacactccggggtgtgtcccttgcgttcgcgagggtaacgcctcgaggtgttggtggcggtgacccccacggtggccaccagggacggcaaactccccacaacgcagcttcggcgccacatcgatctgcttgtcgggagcgccaccctttgctcggccctctacgtgggggacctgtgcggtctgtctttcttgtcggccaactgttcaccttttctcccaggcgccactggacgacgcaagattgcaactgttctatgtatcccggccatataacgggtcaccgcatggcatgggatatgatgatgaactggtcccctacgcggcgttggtggtagctcagctgctccggatcccacaagccatcatggacatgatcgctggtgctcactggggagtcctggcgggcatagcgtatttctccatggtggggaactgggcgaaggtcctgtagtgctgctgctatttgccggcgtcgacgcgggaacccacgtcaccgggggaagcgtcggccgtaccgcgtctgggcttactagtttcttctcaccaggcgccaagcagaatatccaattgatcaacaccaacggcagtggcacatcaatagcacggccttgaactgcaatgatagcctcaacaccggctggatagcagggctcttctattaccacaaattcaactcctcgggctgttccgagaggttggccagctgccgacgcctaccgatttttcccagggctggggccctatcagttacgccaacggaagcgggcccgaccaacggccctactgctggcactaccccccaaaaccttgtggtattgtgtccgcaaagagcgtgtgtggcccagtatattgcttcctcccagccctgtggtggtgggaacgaccgacaagttgggcgcgcctacctacaactggggtggaaaagatacggacgtcttcgtccttaacaacaccaggccaccgttgggcaactggtttggttgacctggatgaactcatctggattcaccaaagtgtgtggggcgcccccctgtgtcatcggaggggtgggcaacaacaccttgctctgccccactgattgtttccgcaagcatccggaagccacatactctcggtgcggctccgtccttggatcacacccaggtgcatggtcgactacccgtataggctttggcattatccttgtaccatcaactacaccatatttaaagtcaggatgtacgtgggaggggtcgagcacaggctggatgcgcctgcaactggacgcggggcgaacgctgtggtctggaagacagggataggtccgagctcagcccattgctgctgtccaccacacagtggcaagtccttccgtgttctttcacgaccctgccagccttgtccaccggcctctccaccttcaccagaacattgtggacgtgcagtacttgtacggggtggggtcaagcatcgcgtcctgggccgtcaggtgggagtacgtcgttctcctgtttcttctgctcgcagacgcgcgcgtctggcctgcttgtggatgatgttactcatatcccaagcggaggcggccttggagaacctcgtaatgctcaatgcagcatccctggccgggacgcacggtcttgtgtccttcctcgtgttcttctgctttgcgtggtatctgaaggtaggtgggtgcccggagcggtctacgccctctacggaatgtggcctctcctcctgctcctgctggcgctgcctcagcgagcatacgcactggacacggaggtggccgcgtcgtgtggcggcgttgtcttgtcgggttaatggcgctgactctgtcaccatattataagcgctacatcggcttgtgcttgtggtggcttcagtatcttctgaccagggtggaagcgcaactgcacgtgtgggttccccccctcaacgtccgagggggggtgatgccgtcatcttactcatgtgtgctgtatacccgactttggtatttgacatcaccaaactactgctggccatcttcggacccctttggattcttcaagccagtttgctcaaagtcccctacttgtgcgcgttcaaggccttctccggatctgcgcgttagtgcggaagatggttggaggtcattacgtgcagatggctatcatcaagttaggggcgcttaccggcacctatgtttataatcacctcactcctcttcgggactggcgcacaacggcctgcgagatctggccgtggctgtggaaccagtcgtcttctcccgaatggagaccaagctcatcacgtggggggcagacactgccgcgtgcggtgatatcatcagcggcttgcccgttccgcccgtaggggccgggagatactgcttggaccagccgacggaatggtctccaaggggtggagattgctggcgcccatcacggcgtacgcccagcagacgagaggcctcctagggtgcataatcaccagcctgactggcgggacaagaaccaagtggagggtgaggtccagatcgtgtcaactgctgcccaaaccttcctggcaacgtgcatcaatggggtatgctggactgtctaccacggggccggaacgagaaccatcgcatccccaagggtcctgtcatccagatgtataccaatgtggaccaagaccttgtgggctggcccgctcctcagggctcccgctcactgacaccctgcacctgcggctcctcggacctttacctggtcacgaggcatgccgatgtcttcccgtgcgccggcggggtgatagcaggggcagcctgctttcaccccggcccatttcctacttgaaaggctcctcggggggtccgctgttgtgccccgcggggcacgccgtgggcatattcagggcgcggtgtgcacccgtggagtggctaaggcggtggacttcatccccgtggagaacctagagacaaccatgagatccccggtgttcacggacaactcctccccaccagcagtgccccagagcttccaggtggcccacctgcatctcccaccggcagcggtaagagcaccaaggtcccggccgcgtacgcagctcagggctacaaggtgttagtgctcaatccctctgttgctgcaacattgggctttggcgcttacatgtccaaggcccaggggtcgatcctaatatcaggactggggtgagaacaattaccactggcagccccatcacgtattccacctacggcaagttcctcgccgacggcgggtgctcggggggtgcttatgacataataatttgtgatgagtgccacccacggatgccacatctatcttgggcatcggcaccgtccttgaccaagcagagactgcgggagcgagactggttgtgctcgccactgctacccctccgggctccgtcactgtgccccatcctaacatgaggaggttgctctgtccactaccggagagatccccttttacggcaaggctatccccctcgaggtgatcaaggggggaagacatctcatcttctgtcactcaaagaagaagtgcgatgagctcgccgcaaagctggtcgcatgggcgtcaatgccgtggcctactaccgcggtcttgacgtgtctgtcatcccaaccagcggcgacgtcgtcgtcgtggcgactgatgccctcatgactggctataccggcgacttcgactccgtgatgactgcaacacgtgtgtcacccagacagtcgatttcagccttgaccctaccttcaccattgagacaaccacgctcccccaggatgctgtctcccggactcaacgtcggggcaggactggtagggggaagccaggcatctacgatttgtggcaccgggggagcgcccctccggcatgttcgactcgtctgtcctctgcgagtgctatgacgcgggctgtgcttggtatgagctcacgcccgctgagactacggttaggctacgagcgtaatgaacaccccggggcttcccgtgtgccaggatcatcttgaattttgggagggcgtctttacgggcctcactcatatagatgcccactttctatcccagacaaagcaaggtggggagaactttccttacctggtagcgtacaagccaccgtgtgcgctagggctcaagcccctcccccatcgtgggaccagatgtggaagtgcttgatccgcctcaaacccaccctccatgggccaacacccctgctatacagactgggcgctgttcaaatgaagtcaccctgacgcacccaatcaccaaatacatcatgacatgcatgtcggctga

SEQ ID NO: 705 - DNA, 4869 bp, Hepatitis C virus
tcgcccacaggacgtcaagttcccgggtggcggtcagatcgttggtggagtttacttgttgccgcgcaggggccctagattgggtgtgcgcgcgacgaggaagacttccgagcggtcgcaacctcgagtagacgtcagcctatccccaaggctcgtcggcccgagggcaggacctgggctcagcccgggtacccttggcctctctacggcaatgagggttgcggttgggcgggatggctcctgtctccccgcggtctcggcctagctggggccccacagacccccggcgtaggtcacgcaatttgggtaaggtcatcgacaccctcacgtgtggcttcgccgatctcatggggtacataccgctcgtcggcgcccctcttggaggcgctgccaggccctggcgcatggcgtccgggttctggaagacggcgtgaattatgcaacagggaatcttcctggttgctctttctctatcttccttctggccctgctctcttgcttgactgtgcccgcttcagcctacatgtgcgcaactcctcggggctttaccatgtcaccaatgattgccctaactcgagtattgtgtacgaggcgggtgatgccatcctacacactccggggtgtgtcccttgcgttcgcgagggtaacgcctcgaggtgttggtggcggtgacccccacggtggccaccagggacggcaaactccccacaacgcagcttcggcgccacatcgatctgcttgtcgggagcgccaccctttgctcggccctctacgtgggggacctgtgcggtctgtctttcttgtcggccaactgttcaccctttctcccaggcgccactggacgacgcaagattgcaactgttctatgtatcccggccatataacgggtcaccgcatggcatgggatatgatgatgaactggtcccctacgcggcgttggtggtagctcagctgctccgggtcccgcaagccatcatggacatgatcgctggtgctcactggggagtcctggcgggcatagcgtatttctccatggtggggaactgggcgaaggtcctgtagtgctgctgctatttgccggcgtcgacgcgggaacccacgtcaccgggggaagcgtcggccgtaccgcgtctgggcttactagtttcttctcaccaggcgccaagcagaatatccaactgatcaacaccaacggcagtggcacatcaatagcacggccttgaactgcaatgatagcctcaacaccggctggatagcagggctcttctattaccacaaattcaactcttcgggctgtcccgagaggttggccagctgccgacgcctaccgatttttcccagggctggggccctatcagttacgccaacggaagcgggcccgaccaacggccctactgctggcactaccccccaaaaccttgtggtattgtgtccgcaaagagcgtgtgtggcccagtatattgcttcctcccagccctgtggtggtgggaacgaccgacaagttgggcgcgcctacctacaactggggtggaaaagatacggacgtcttcgtccttaacaacaccaggccaccgttgggcaactggtttggttgacctggatgaactcatctggattcaccaaagtgtgtggggcgcccccctgtgtcatcggaggggtgggcaacaacaccttgctctgccccactgattgtttccgcaagcatccggaagccacatactctcggtgcggctccgtccttggatcacacccaggtgcatggtcgactacccgtataggctttggcattatccttgtaccatcaactacaccatatttaaagtcaggatgtacgtgggaggggtcgagcacaggctggatgcgcctgcaactggacgcggggcgaacgctgtggtctggaagacagggataggtccgagctcagcccattgctgctgtccaccacacagtggcaagtccttccgtgttctttcacgaccctgccagccttgtccaccggcctcttcaccttcaccagaacattgtggacgtgcagtacttgtacggggtggggtcaagcatcgcgtcctgggccgtcaggtgggagtacgtcgttctcctgtttcttctgctcgcagacgcgcgcgtctggcctgcttgtggatgatgttactcatatcccaagcggaggcggccttggagaacctcgtaatgctcaatgcagcatccctggccgggacgcacggtcttgtgtccttcctcgtgttcttctgctttgcgtggtatctgaaggtaggtgggtgcccggagcggtctacgccctctacggaatgtggcctctcctcctgctcctgctggcgctgcctcagcgagcatacgcactggacacggaggtggccgcgtcgtgtggcggcgttgtcttgtcgggttaatggcgctgactctgtcaccatattataagcgctacatcggcttgtgcttgtggtggcttcagtatcttctgaccagggtggaagcgcaactgcacgtgtgggttccccccctcaacgtccgagggggggtgatgccgtcatcttactcatgtgtgctgtatacccgactttggtatttgacatcaccaaactactgctggccatcttcggacccctttggattcttcaagccagtttgctcaaagtcccctacttgtgcgcgttcaaggccttctccggatctgcgcgttagtgcggaagatggttggaggtcattacgtgcagatggctatcatcaagttaggggcgcttaccggcacctatgtttataaccacctcactcctcttcgggactggcgcacaacggcctgcgagatctggccgtggctgtggaaccagtcgtcttctcccgaatggagaccaagctcatcacgtggggggcagacactgccgcgtgcggtgatatcatcagcggcttgcccgttccgcccgtaggggccgggagatactgcttggaccagccgacggaatggtctccaaggggtggagattgctggcgcccatcacggcgtacgcccagcagacgagaggcctcctagggtgcataatcaccagcctgactggcgggacaagaaccaagtggagggtgaggtccagatcgtgtcaactgctgcccaaaccttcctggcaacgtgcatcaatggggtatgctggactgtctaccacggggccggaacgagaaccatcgcatccccaagggtcctgttatccagatgtataccaatgtggaccaagaccttgtgggctggcccgctcctcagggctcccgctcactgacaccctgcacctgcggctcctcggacctttacctggtcacgaggcatgccgatgtcttcccgtgcgccggcggggtgatagcaggggcagcctgctttcaccccggcccatttcctacttgaaaggctcctcggggggtccgctgttgtgccccgcggggcacgccgtgggcatattcagggcgcggtgtgcacccgtggagtggctaaggcggtggacttcatccccgtggagaacctagagacaaccatgagatccccggtgttcacggacaactcctccccaccagcagtgccccagagcttccaggtggcccacctgcatctcccaccggcagcggtaagagcaccaaggtcccggccgcgtacgcagctcagggctacaaggtgttagtgctcaatccctctgttgctgcaacattgggctttggcgcttacatgtccaaggcccaggggtcgatcctaatatcaggactggggtgagaacaattaccactggcagccccatcacgtattccacctacggcaagttcctcgccgacggcgggtgctcggggggtgcttatgacataataatttgtgatgagtgccacccacggatgccacatctatcttgggcatcggcaccgtccttgaccaagcagagactgcgggagcgagactggttgtgctcgccactgctacccctccgggctccgtcactgtgccccatcctaatatgaggaggttgctctgtccactaccggagagatccccttttacggcaaggctatccccctcgaggtgatcaaggggggaagacatctcatcttctgtcactcaaagaagaagtgcgatgagctcgccgcaaagctggtcgcatgggcgtcaatgccgtggcctactaccgcggtcttgacgtgtctgtcatcccaaccagcggcgatgtcgtcgtcgtggcgactgatgccctcatgactggctataccggcgacttcgactccgtgatgactgcaacacgtgtgtcacccagacagtcgatttcagccttgaccctaccttcaccattgagacaaccacgctcccccaggatgctgtctcccggactcaacgtcggggcaggactggtagggggaagccaggcatctacgatttgtggcaccgggggagcgcccctccggcatgttcgactcgtctgtcctctgcgagtgctatgacgcgggctgtgcttggtatgagctcacgcccgctgagactacggttaggctacgagcgtaatgaacaccccggggcttcccgtgtgccaggatcatcttgaattttgggagggcgtctttacgggccttactcatatagatgcccactttctatcccagacaaagcaaggtggggagaactttccttacctggtagcgtacaagccaccgtgtgcgctagggctcaagcccctcccccatcgtgggaccagatgtggaagtgcttgatccgcctcaaacccaccctccatgggccaacacccctgctatacagactgggcgctgttcaaatgaagtcaccctgacgcacccaatcaccaaatacatcatgacatgcatgtcggctga

SEQ ID NO: 706 - DNA, 4869 bp, Hepatitis C virus
tcgcccacaggacgtcaagttcccgggtggcggtcagatcgttggtggagtttacttgttgccgcgcaggggccctagattgggtgtgcgcgcgacgaggaagacttccgagcggtcgcaacctcgagtagacgtcagcctatccccaaggctcgtcggcccgagggcaggacctgggctcagcccgggtacccttggcctctctacggcaatgagggttgcggttgggcgggatggctcctgtctccccgcggtctcggcctagctggggccccacagacccccggcgtaggtcgcgcaatttgggtaaggtcatcgataccctcacgtgtggcttcgccgatctcatggggtacataccgctcgtcggcgcccctcttggaggcgctgccaggccctggcgcatggcgtccgggttctggaagacggcgtgaattatgcaacagggaatcttcctggttgctctttctctatcttccttctggccctgctctcttgcctgactgtgcccgcttcagcctacatgtgcgcaactcctcgggactttaccatgtcaccaatgattgccctaactcgagtattgtgtacgaggcgggtgatgccatcctacacactccggggtgtgtcccttgcgttcgcgagggtaacgcctcgaggtgttggtggcggtgacccccacggtggccaccagggacggcaaactccccacaacgcagcttcggcgccacatcgatctgcttgtcgggagcgccaccctttgctcggccctctacgtgggggacctgtgcggtctgtctttcttgtcggccaactgttcaccttttctcccaggcgccactggacgacgcaagattgcaactgttctatgtatcccggccatataacgggtcaccgcatggcatgggatatgatgatgaactggtcccctacgcggcgttggtggtagctcagctgctccggatcccgcaagccatcatggacatgatcgctggtgcccactggggagtcctggcgggcatagcgtatttctccatggtggggaactgggcgaaggtcctgtagtgctgctgctatttgccggcgtcgacgcgggaacccacgtcaccgggggaagcgtcgcccataccgcgtctgggcttgctagtttcttctcaccaggcgccaagcagaatatccaactgatcaacaccaacggcagtggcacatcaatagcacggccttgaactgcaatgatagcctcaacaccggctggatagcagggctcttctattaccacaaattcaactcttcgggctgttccgagaggttggccagctgccgacgcctaccgatttttcccagggctggggccctatcagttacgccaacggaagcgggcccgaccaacggccctactgctggcactaccccccaaaaccttgtggtattgtgtccgcaaagagcgtgtgtggtccagtatattgcttcctcccagccctgtggtggtgggaacgaccgacaagttgggcgcgcctacctacaactggggtgggaaagatacggacgtcttcgtccttaacaacaccaggccaccgttgggcaactggtttggttgacctggatgaactcatctggattcaccaaagtgtgtggggcgcccccctgtgtcatcggaggggtgggcaacaacaccttgctctgccccactgattgtttccgcaagcatccggaagccacatactctcggtgcggctccgtccttggatcacacccaggtgcatggtcgactacccgtataggctttggcattatccttgtaccatcaactacaccatatttaaagttaggatgtacgtgggaggggtcgagcacaggctggatgcgcctgcaactggacgcggggcgaacgctgtggtctggaagacagggacaggtccgagctcagcccattgctgctgtccaccacacagtggcaagtccttccgtgttctttcacgaccctgccagccttgtccaccggcctctccaccttcaccagaacattgtggacgtgcagtacttgtacggggtggggtcaagcatcgcgtcctgggccgtcaggtgggagtacgtcgttctcctgtttcttctgctcgcagacgcgcgcgtctggcctgcttgtggatgatgttactcatatcccaagcggaggcggccttggagaacctcgtaatgctcaatgcagcatccctggccgggacgcacggtcttgtgtccttcctcgtgttcttctgctttgcgtggtatctgaaggtaggtgggtgcccggagcggtctacgccctctacggaatgtggcctctcctcctgctcctgctggcgctgcctcagcgagcatacgcactggacacggaggtggccgcgtcgtgtggcggcgttgtcttgtcgggttaatggcgctgactctgtcaccatattataagcgctacatcggcttgtgcttgtggtggcttcagtatcttctgaccagggtggaagcgcaactgcacgtgtgggttccccccctcaacgtccgagggggggtgatgccgtcatcttactcatgtgtgctgtatacccgactttggtatttgacatcaccaaactactgctggccatcttcggacccctttggattcttcaagccagtttgctcaaagtcccctacttgtgcgcgttcaaggccttctccggatctgcgcgttagcgcggaagatggttggaggtcattacgtgcagatggttatcatcaagttaggggcgcttaccggcacctatgtttataaccacctcactcctcttcgggactggcgcacaacggcctgcgagatctggccgtggctgtggaaccagtcgtcttctcccgaatggagaccaagctcatcacgtggggggcagacactgccgcgtgcggtgatatcatcagcggcttgcccgttccgcccgtaggggccgggagatactgcttggaccagccgacggaatggtctccaaggggtggagattgctggcgcccatcacggcgtacgcccagcagacgagaggcctcctagggtgcataatcaccagcctgactggcgggacaaaaaccaagtggagggtgaggtccagatcgtgtcaactgctgcccaaaccttcctggcaacgtgcatcaatggggtatgctggactgtctaccacggggccggaacgagaaccatcgcatccccaagggtcctgttatccagatgtataccaatgtggaccaagaccttgtgggctggcccgctcctcatggctcccgctcactgacaccctgcacctgcggctcctcggacctttacctggtcacgaggcatgccgatgtcttcccgtgcgccggcggggtgatagcaggggcagcctgctttcaccccggcccatttcctacttgaaaggctcctcggggggtccgctgttgtgccccgcggggcacgccgtgggcatattcagggcgcggtgtgcacccgtggagtggctaaggcggtggacttcatccccgtggagaacctagagacaaccatgagatccccggtgttcacggacaactcctccccaccagcagtgccccagagcttccaggtggcccacctgcatctcccaccggcagcggtaagagcaccaaggtcccggccgcgtacgcagctcagggctacaaggtgttagtgctcaatccctctgttgctgcaacattgggctttggcgcttacatgtccaaggcccaggggtcgatcctaatatcaggactggggtgagaacaattaccactggcagccccatcacgtattccacctacggcaagttcctcgccgacggcgggtgctcggggggtgcttatgacataataatttgcgatgagtgccacccacggatgccacatctatcttgggcatcggcaccgtccttgaccaagcagagactgcgggcgcgagactagttgtgctcgccactgctacccctccgggctccgtcactgtgccccatcctaacatgaggaggttgctctgtccactaccggagagatccccttttacggcaaggctatccccctcgaggtgatcaaggggggaagacatctcatcttctgtcactcaaagaagaagtgcgatgagctcgccgcaaagctggtcgcatgggcgtcaatgccgtggcctactaccgcggtcttgacgtgtctgtcatcccaaccagcggcgacgtcgtcgtcgtggcgactgatgccctcatgactggctataccggcgacttcgactccgtgatgactgcaacacgtgtgtcacccagacagtcgatttcagccttgaccctaccttcaccattgagacaaccacgctcccccaggatgctgtctcccggactcaacgtcggggcaggactggtagggggaagccaggcatctacgatttgtggcaccgggggagcgcccctccggcatgttcgactcgtctgtcctctgcgagtgctatgacgcgggctgtgcttggtatgagctcacgcccgctgagactacggttaggctacgagcgtaatgaacaccccggggcttcccgtgtgccaggatcatcttgaattttgggagggcgtctttacgggcctcactcatatagatgcccactttctatcccagacaaagcaaggtggggagaactttccttacctggtagcgtacaagccaccgtgtgcgctagggctcaagcccctcccccatcgtgggaccagatgtggaagtgcttgatccgcctcaaacccaccctccatgggccaacacccctgctatacagactgggcgctgttcaaatgaagtcaccctgacgcacccaatcaccaaatacatcatgacatgcatgtcggctga

SEQ ID NO: 707 - DNA, 4869 bp, Hepatitis C virus
tcgcccacaggacgtcaagttcccgggtggcggtcagatcgttggtggagtttacttgttgccgcgcaggggccctagattgggtgtgcgcgcgacgaggaagacttccgagcggtcgcaacctcgagtagacgtcagcctatccccaaggctcgtcggcccgagggcaggacctgggctcagcccgggtacccttggcctctctacggcaatgagggttgcggttgggcgggatggctcctgtctccccgcggtctcggcctagctggggccccacagacccccggcgtaggtcgcgcaatttgggtaaggtcatcgataccctcacgtgtggcttcgccgatctcatggggtacataccgctcgtcggcgcccctcttggaggcgctgccaggccctggcgcatggcgtccgggttctggaagacggcgtgaattatgcaacagggaatcttcctggttgctctttctctatcttccttctggccctgctctcttgcctgactgtgcccgcttcagcctacatgtgcgcaactcctcgggactttaccatgtcaccaatgattgccctaactcgagtattgtgtacgaggcgggtgatgccatcctacacactccggggtgtgtcccttgcgttcgcgagggtaacgcctcgaggtgttggtggcggtgacccccacggtggccaccagggacggcaaactccccacaacgcagcttcggcgccacatcgatctgcttgtcgggagcgccaccctttgctcggccctctacgtgggggacctgtgcggtctgtctttcttgtcggccaactgttcaccttttctcccaggcgccactggacgacgcaagattgcaactgttctatgtatcccggccatataacgggtcaccgcatggcatgggatatgatgatgaactggtcccctacgcggcgttggtggtagctcagctgctccggatcccgcaagccatcatggacatgatcgctggtgcccactggggagtcctggcgggtatagcgtatttctccatggtggggaactgggcgaaggtcctgtagtgctgctgctatttgccggcgtcgacgcgggaacccacgtcaccgggggaagcgtcgcccataccgcgtctgggcttgctagtttcttctcaccaggcgccaagcagaatatccaactgatcaacaccaacggcagtggcacatcaatagcacggccttgaactgcaatgatagcctcaacaccggctggatagcagggctcttctattaccacaaattcaactcttcgggctgttccgagaggttggccagctgccgacgcctaccgatttttcccagggctggggccctatcagttacgccaacggaagcgggcccgaccaacggccctactgctggcactaccccccaaaaccttgtggtattgtgcccgcaaagagcgtgtgtggtccagtatattgcttcctcccagccctgtggtggtgggaacgaccgacaagttgggcgcgcctacctacaactggggtgggaaagatacggacgtcttcgtccttaacaacaccaggccaccgttgggcaactggtttggttgacctggatgaactcatctggattcaccaaagtgtgtggggcgcccccctgtgtcatcggaggggtgggcaacaacaccttgctctgccccactgattgtttccgcaagcatccggaagccacatactctcggtgcggctccgtccttggatcacacccaggtgcatggtcgactacccgtataggctttggcattatccttgtaccatcaactacaccatatttaaagttaggatgtacgtgggaggggtcgagcacaggctggatgcgcctgcaactggacgcggggcgaacgctgtggtctggaagacagggacaggtccgagctcagcccattgctgctgtccaccacacagtggcaagtccttccgtgttctttcacgaccctgccagccttgtccaccggcctctccaccttcaccagaacattgtggacgtgcagtacttgtacggggtggggtcaagcatcgcgtcctgggccgtcaggtgggagtacgtcgttctcctgtttcttctgctcgcagacgcgcgcgtctggcctgcttgtggatgatgttactcatatcccaagcggaggcggccttggagaacctcgtaatgctcaatgcagcatccctggccgggacgcacggtcttgtgtccttcctcgtgttcttctgctttgcgtggtatctgaaggtaggtgggtgcccggagcggtctacgccctctacggaatgtggcctctcctcctgctcctgctggcgctgcctcagcgagcatacgcactggacacggaggtggccgcgtcgtgtggcggcgttgtcttgtcgggttaatggcgctgactctgtcaccatattataagcgctacatcggcttgtgcttgtggtggcttcagtatcttctgaccagggtggaagcgcaactgcacgtgtgggttccccccctcaacgtccgagggggggtgatgccgtcatcttactcatgtgtgctgtatacccgactttggtatttgacatcaccaaactactgctggccatcttcggacccctttggattcttcaagccagtttgctcaaagtcccctacttgtgcgcgttcaaggccttctccggatctgcgcgttagcgcggaagatggttggaggtcattacgtgcagatggttatcatcaagttaggggcgcttaccggcacctatgtttataaccacctcactcctcttcgggactggcgcacaacggcctgcgagatctggccgtggctgtggaaccagtcgtcttctcccgaatggagaccaagctcatcacgtggggggcagacactgccgcgtgcggtgatatcatcagcggcttgcccgttccgcccgtaggggccgggagatactgcttggaccagccgacggaatggtctccaaggggtggagattgctggcgcccatcacggcgtacgcccagcagacgagaggcctcctagggtgcataatcaccagcctgactggcgggacaaaaaccaagtggagggtgaggtccagatcgtgtcaactgctgcccaaaccttcctggcaacgtgcatcaatggggtatgctggactgtctaccacggggccggaacgagaaccatcgcatccccaagggtcctgttatccagatgtataccaatgtggaccaagaccttgtgggctggcccgctcctcatggctcccgctcactgacaccctgcacctgcggctcctcggacctttacctggtcacgaggcatgccgatgtcttcccgtgcgccggcggggtgatagcaggggcagcctgctttcaccccggcccatttcctacttgaaaggctcctcggggggtccgctgttgtgccccgcggggcacgccgtgggcatattcagggcgcggtgtgcacccgtggagtggctaaggcggtggacttcatccccgtggagaacctagagacaaccatgagatccccggtgttcacggacaactcctccccaccagcagtgccccagagcttccaggtggcccacctgcatctcccaccggcagcggtaagagcaccaaggtcccggccgcgtacgcagctcagggctacaaggtgttagtgctcaatccctctgttgctgcaacattgggctttggcgcttacatgtccaaggcccaggggtcgatcctaatatcaggactggggtgagaacaattaccactggcagccccatcacgtattccacctacggcaagttcctcgccgacggcgggtgctcggggggtgcttatgacataataatttgcgatgagtgccacccacggatgccacatctatcttgggcatcggcaccgtccttgaccaagcagagactgcgggcgcgagactagttgtgctcgccactgctacccctccgggctccgtcactgtgccccatcctaacatgaggaggttgctctgtccactaccggagagatccccttttacggcaaggctatccccctcgaggtgatcaaggggggaagacatctcatcttctgtcactcaaagaagaagtgcgatgagctcgccgcaaagctggtcgcatgggcgtcaatgccgtggcctactaccgcggtcttgacgtgtctgtcatcccaaccagcggcgacgtcgtcgtcgtggcgactgatgccctcatgactggctataccggcgacttcgactccgtgatgactgcaacacgtgtgtcacccagacagtcgatttcagccttgaccctaccttcaccattgagacaaccacgctcccccaggatgctgtctcccggactcaacgtcggggcaggactggtagggggaagccaggcatctacgatttgtggcaccgggggagcgcccctccggcatgttcgactcgtctgtcctctgcgagtgctatgacgcgggctgtgcttggtatgagctcacgcccgctgagactacggttaggctacgagcgtaatgaacaccccggggcttcccgtgtgccaggatcatcttgaattttgggagggcgtctttacgggcctcactcatatagatgcccactttctatcccagacaaagcaaggtggggagaactttccttacctggtagcgtacaagccaccgtgtgcgctagggctcaagcccctcccccatcgtgggaccagatgtggaagtgcttgatccgcctcaaacccaccctccatgggccaacacccctgctatacagactgggcgctgttcaaatgaagtcaccctgacgcacccaatcaccaaatacatcatgacatgcatgtcggctga

SEQ ID NO: 708 - DNA, 4869 bp, Hepatitis C virus
tcgcccacaggacgtcaagttcccgggtggcggtcagatcgttggtggagtttacttgttgccgcgcaggggccctagattgggtgtgcgcgcgacgaggaagacttccgagcggtcgcaacctcgagtagacgtcagcctatccccaaggctcgtcggcccgagggcaggacctgggctcagcccgggtacccttggcctctctacggcaatgagggttgcggttgggcgggatggctcctgtctccccgcggtctcggcctagctggggccccacagacccccggcgtaggtcgcgcaatttgggtaaggtcatcgataccctcacgtgtggcttcgccgatctcatggggtacataccgctcgtcggcgcccctcttggaggcgctgccaggccctggcgcatggcgtccgggttctggaagacggcgtgaattatgcaacagggaatcttcctggttgctctttctctatcttccttctggccctgctctcttgcctgactgtgcccgcttcagcctacatgtgcgcaactcctcggggctttaccatgtcaccaatgattgccctaactcgagtattgtgtacgaggcgggtgatgccatcctacacactccggggtgtgtcccttgcgttcgcgagggtaacgcctcgaggtgttggtggcggtgacccccacggtggccaccagggacggcaaactccccacaacgcagcttcggcgccacatcgatctgcttgtcgggagcgccaccctttgctcggccctctacgtgggggacctgtgcggtctgtctttcttgtcggccaactgttcaccttttctcccaggcgccactggacgacgcaagattgcaactgttctatgtatcccggccatataacgggtcaccgcatggcatgggatatgatgatgaactggtcccctacgcggcgttggtggtagctcagctgctccggatcccgcaagccatcatggacatgatcgctggtgctcactggggagtcctggcgggcatagcgtatttctccatggtggggaactgggcgaaggtcctgtagtgctgttgctgtttgccggcgtcgacgcgggaacccacgtcaccgggggaagcgccggccgtaccgcgtctgggcttactagtttcttctcaccaggcgccaagcagaatatccaactgatcaacaccaacggcagtggcacatcaatagcacggccttgaactgcaatgatagcctcaacaccggctggatagcagggctcttctattaccacaaattcaactcttcgggctgttccgagaggttggccagctgtcgacgcctaccgatttttcccagggctggggccctatcagttacgccaacggaagcgggcccgaccaacggccctactgctggcactaccccccaaaaccttgtggtattgtgtccgcaaagagcgtgtgtggcccagtatattgcttcctcccagccctgtggtggtgggaacgaccgacaagttgggcgcgcctacctacaactggggtggaaaggatacggacgtcttcgtccttaacaacaccaggccaccgttgggcaactggtttggttgacctggatgaactcatctggattcaccaaagtgtgcggggcgcccccctgtgtcatcggaggggtgggcaacaacaccttgctctgccccactgattgtttccgcaagcatccggaagccacatactctcggtgcggctccgtccttggatcacacccaggtgcatggtcgactacccgtataggctttggcattatccttgtaccatcaactacaccatatttaaagtcaggatgtacgtgggaggggtcgagcacaggctggatgcgcctgcaactggacgcggggcgaacgctgtggtctggaagacagggacaggtccgagctcagcccattgctgctgtccaccacacagtggcaagtccttccgtgttctttcacgaccctgccagccttgtccaccggcctctccaccttcaccagaacattgtggacgtgcagtacttgtacggggtggggtcaagcatcgcgtcctgggccgtcaggtgggagtacgtcgttctcctgtttcttctgctcgcagacgcgcgcgtctggcctgcttgtggatgatgttactcatatcccaagcggaggcggccctggagaacctcgtaatgctcaatgcagcatccctggccgggacgcacggtcttgtgtccttcctcgtgttcttctgctttgcgtggtatctgaaggtaggtgggtgcccggagcggtctacgccctctacggaatgtggcctctcctcctgctcctgctggcgctgcctcagcgagcatacgcgctggacacggaggtggccgcgtcgtgtggcggcgttgtcttgtcgggttaatggcgctgactctgtcaccatattataagcgctacatcggcttgtgcttgtggtggcttcagtatcttctgaccagggtggaagcgcaactgcacgtgtgggttccccccctcaacgtccgagggggggtgatgccgtcatcttactcatgtgtgctgtatacccgactttggtatttgacatcaccaaactactgctggccatcttcggacccctttggattcttcaagccagtttgctcaaagtcccctacttgtgcgcgttcaaggccttctccggatctgcgcgttagtgcggaagatggttggaggtcattacgtgcagatggctatcatcaagttaggggcgcttaccggcacctatgtttataaccacctcactcctcttcgggactggcgcacaacggcctgcgagatctggccgtggctgtggaaccagtcgtcttctcccgaatggagaccaagctcatcacgtggggggcagacactgccgcgtgcggtgatatcatcagcggcttgcccgttccgcccgtaggggccgggagatactgcttggaccagccgacggaatggtctccaaggggtggagattgctggcgcccatcacggcgtacgcccagcagacgagaggcctcctagggtgcataatcaccagcctgactggcgggacaaaaaccaagtggagggtgaggtccagatcgtgtcaactgctgcccaaaccttcctggcaacgtgcatcaatggggtatgctggactgtctaccacggggccggaacgagaaccatcgcatccccaagggtcctgttatccagatgtataccaatgtggaccaagaccttgtgggctggcccgctcctcatggctcccgctcactgacaccctgcacctgcggctcctcggacctttatctggtcacgaggcatgccgatgtcttcccgtgcgccggcggggcgatagcaggggcagcctgctttcaccccggcccatttcctacttgaaaggctcctcggggggtccgctgttgtgccccgcggggcacgccgtgggcatattcagggcgcggtgtgcacccgtggagtggctaaggcggtggacttcatccccgtggagaacctagagacaaccatgagatccccggtgttcacggacaactcctccccaccagcagtgccccagagcttccaggtggcccacctgcatctcccaccggcagcggtaagagtaccaaggtcccggccgcgtacgcagctcagggctacaaggtgttagtgctcaatccctctgttgctgcaacattgggctttggcgcttacatgtccaaggcccaggggtcgatcctaatatcaggactggggtgagaacaattaccactggcagccccatcacatattccacctacggcaagttcctcgccgacggcgggtgctcggggggtgcttatgacataataatttgcgatgagtgccacccacggatgccacatctatcttgggcatcggcaccgtccttgaccaagcagagactgcgggagcgagactggttgtgctcgccactgctacccctccgggctccgtcactgtgccccatcctaacatgaggaggttgctctgtccactaccggagagatccccttttacggcaaggctatccccctcgaggtgatcaaggggggaagacatctcatcttctgtcactcaaagaagaagtgcgatgagctcgccgcaaagctggtcgcatgggcgtcaatgccgtggcctactaccgcggtcttgacgtgtctgtcatcccaaccagcggcgacgtcgtcgtcgtggcgactgatgccctcatgactggctataccggcgacttcgactccgtgatgactgcaacacgtgtgtcacccagacagtcgatttcagccttgaccctaccttcaccattgagacaaccacgctcccccaggatgctgtctcccggactcaacgtcggggcaggactggtagggggaagccaggcatctacgatttgtggcaccgggggagcgcccctccggcatgttcgactcgtctgtcctctgtgagtgctatgacgcgggctgtgcttggtatgagctcacgcccgctgagactacggttaggctacgagcgtaatgaacaccccggggcttcccgtgtgccaggatcatcttgaattttgggagggcgtctttacgggcctcactcatatagatgcccactttctatcccagacaaagcaaggtggggagaactttccttacctggtagcgtacaagccaccgtgtgcgctagggctcaagcccctcccccatcgtgggaccagatgtggaagtgcttgatccgcctcaaacccaccctccatgggccaacacccctgctatacagactgggcgctgttcaaatgaagtcaccctgacgcacccaatcaccaaatacatcatgacatgcatgtcggctga

SEQ ID NO: 709 - DNA, 4869 bp, Hepatitis C virus
ccgcccacaggacgtcaagttcccgggtggcggtcagatcgttggtggagtttacttgttgccgcgcaggggccctagattgggtgtgcgcgcgacgaggaagacttccgagcggtcgcaacctcgagtagacgtcagcctatccccaaggctcgtcggcccgagggcaggacctgggctcagcccgggtacccttggcccctctatggcaatgagggttgcggttgggcgggatggctcctgtctccccgcggtctcggcctagctggggccccacggacccccggcgtaggtcgcgcaatttgggtaaggtcatcgatacccttacgtgtggcttcgccgatctcatggggtacataccgctcgtcggcgcccctcttggaggcgctgccaggccctggcgcacggcgtccgggttctggaagacggcgtgaattatgcaacagggaatcttcctggttgctctttctctatcttccttctggccctgctctcttgcttgactgtgcccgcttcagcctacaagtgcgcaactcctcagggctttaccatgtcaccaatgattgccctaactcgagtattgtgtacgaggcgggtgatgccatcctgcacactccggggtgtgtcccttgcgttcgcgagggtaacgcctcgaggtgctggtggcggtgacccccacggtggccaccagggacggcaaactccccacaacgcagcttcggcgccacatcgatctgcttgtcgggagcgccaccctttgctcggccctctacgtgggggacctgtgcggtctgtctttcttgtcggccaactgttcaccttttctcccaggcgccactggacaacgcaagattgcaattgttctatgtatcccggccatataacgggtcaccgcatggcatgggatatgatgatgaactggtcccctacgcggcgttggtggtagctcagctgctccggatcccacaagccatcatggacatgatcgctggtgctcactggggagtcctggcgggcatagcgtatttctccatggtggggaactgggcgaaggtcctgtagtgctgctgctatttgccggcgtcgacgcggaaacccacgtcaccgggggaagtgccggccataccgtgtctgggttcgctgggctcttcacaacaggacccaagcagaatatccaactgatcaacaccaacggcagtggcacatcaatagcacggccttgaactgcaatgatacccttaacactggctggatagcagggctcctctatcaccacaaattcaactcttcgggctgttccgagaggttggccagctgccgacgcctaccgatttttctcagggctggggccccatcagttatgccaacggaagcgggcccgaccaacggccctactgctggcactaccccccaaaaccttgtactattgtgcccgcaaagaacgtgtgtggcccagtatattgcttcctcccagccctgtggtggtgggaacgaccgacaggtcgggcgcgcctacctacagctggggtgaaaaagagacggacgtcttcgtccttaacaacaccaggccaccgctgggcaactggtttggttgacctggatgaactcaactggattcaccaaagtgtgcggagcgcccccttgtgtcatcggaggggtgggcaacaacaccttgctctgccccactgactgtttccgcaagcatccggaagccacatactctcggtgcggctccgtccctggatcacacccaggtgcatggtcgactacccgtataggctttggcattatccctgtaccatcaactataccagattcaaagtcaggatgtacgtgggaggggtcgagcacaggctggatgcgcctgcaactggacgcggggcgagcgctgtgatctggaagacagggacaggtccgagctcagcccattgctgctgtccaccacacagtggcaagtccttccgtgttctttcacgaccctgccagccttgtccaccggcctctccacctccaccagaacattgtggacgtgcagtacttgtacggggtggggtcaagcatcgcgtcctgggccattaagtgggagtacgtcattctcctgtttcttctgctcgcagacgcgcgcgtctgtcctgcttgtggatgatgttactcatatcccaagcggaggcggctttggagaacctcgtaatactcaatgcagcatccctggccgggacgcacggtctcgtgtccttcctcacgttcttctgctttgcgtggtatctgaaggtaggtgggtgcccggagcggtctacgccctctacgggatgtggcctctcctcctgctcctgttggcgctgcctcagcgagcgtacgcactggacacggaggtggccgcgtcgtgtggcggcgcaatcttgtcgggttaatggcgctgactctgtcaccatattataagcgctacatcagcttgtgcttgtggtggcttcagtatcttctgaccagggtagaagcgcaactgcacgtgtgggttccccccctcaacgtccgagggggggcgatgccgtcatcttactcatgtgtgttgtacacccgactttgctatttgacatcaccaaactactgctggccatcttcggacccctttggattcttcaagccagtttgctcagagtcccctacttgtgcgcgttcaaggccttctccggatctgcgcgctagcgcggaagatggttggaggccattacgtgcagatggccatcatcaagttaggggcgcttaccggcacctatgtttacaaccaccttactcctcttcgagactggcgcacaacggcctgcgagatctggccgtggctgtggaaccagtcgtcttctcccgaatggagaccaagctcatcacgtggggggcagacaccgccgcgtgcggtgacatcatcaacggcttgcccgttccgcccgtaggggccgggagatactgcttggaccagccgacggaatggtctccaaggggtggaggttgctggcgcccatcacggcgtacgcccagcagacgagaggcctcctagggtgcataatcaccagcctgaccggcgggacaaaaaccaagtggagggtgaggttcagatcgtatcaactgctgcccaaaccttcttggcaacgtgcatcaatggggtatgctggactgtctaccacggggctggaacgaggaccatcgcatctccaagggtcctgttatccagatgtataccaatgtagaccaagaccttgtgggctggcccgctcctcaaggctcccgctcactgacaccctgcacctgcggctcctcggacctttacctgatcacgaggcacgccgatgttttcccgtgcgccggcggggtgatagcaggggcagcctgctttcgccccggcccatttcctacttgaaaggctcctcggggggtccgctgttgtgccccgcgggacacgccgtgggcatatttagggcgcggtgtgcacccgtggagtggctaaggcggtggacttcatccccgtggagaacctagagacaaccatgagatccccggtgttcacggacaactcctccccaccagcagtgccccagagcttccaggtggcccacctgcatctcccaccggcagcggtaagagcaccaaggtcccggccgcatacgcagctcagggctacaaggtgttagtgctcaacccctctgttgctgcaacattgggttttggcgcttacatgtccaaggcccaggggtcgatcctaatatcaggactggggtgagaacaattaccactggcagccccatcacgtactccacctacggcaagttccttgccgacggcgggtgctcggggggtgcttatgacataataatttgcgacgagtgccacccacggatgccacatccatcttgggcatcggcaccgtccttgaccaagcagagactgcgggagcgagactggttgtgctcgccactgctacccctccgggctccgtcactgtgccccatcctaacatgaggaggttgctctgtccactaccggagagatccccttttacggcaaggccatccccctcgaggtgatcaaggggggaagacatctcatcttctgccactcaaagaagaagtgcgatgagctcgccgcaaagctggtcgcataggcgtcaatgccgtggcctactaccgcggtcttgacgtgtctgtcatcccgaccagcggcgacgtcgtcgtcgtggcgactgatgccctcatgactggctataccggcgacttcgactccgtgatgactgcaacacgtgtgtcacccagacagtcgatttcagccttgaccctaccttcaccattgagacaaccacgctcccccaggacgctgtctcccggactcaacgtcggggcaggactggcagggggaagccaggcatctacgatttgtggcaccgggggagcgtccctccggcatgttcgactcgtccgtcctctgtgagtgctatgacgcgggctgtgcttggtacgagctcacgcccgccgagactacggttaggctacgagcgtaatgaacaccccggggcttcccgtgtgccaggatcatcttgaattttgggagggcgtctttacgggcctcactcatatagatgcccactttctatcccagacaaagcaaggtggggagaactttccttacctggtagcgtacaagccaccgtgtgcgctagggctcaagcccctcccccatcgtgggaccagatgtggaagtgcttgatccgcctcaaacccacccttcatgggccaacacccctgctatacagattgggcgctgttcaaatgaagtcaccctgacgcacccaatcaccaaatacatcatgacatgcatgtcggctga

SEQ ID NO: 710 - DNA, 4869 bp, Hepatitis C virus
ccgcccacaggacgttaagttcccgggtggcggtcagatcgttggtggagtttacttgttgccgcgcaggggccctagattgggtgtgcgcgcgacgaggaagacttccgagcggtcgcaacctcgagtagacgtcagcctatccccaaggctcgtcggcccgagggcaggacctgggctcagcccgggtacccttggcccctctatggcaatgagggttgcggttgggcgggatggctcctgtctccccgcggtctcggcctagctggggccccacggacccccggcgtaggtcgcgcaatttgggtaaggtcatcgatacccttacgtgtggcttcgccgatctcatggggtacataccgctcgtcggcgcccctcttggaggcgctgccaggccctggcgcacggcgtccgggttctggaagacggcgtgaattatgcaacagggaatcttcctggttgctctttctctatcttccttctggccctgctctcttgcttgactgtgcccgcttcagcctacaagtgcgcaactcctcagggctttaccatgtcaccaataattgccctaactcgagtattgtgtacgaggcgggtgatgccatcctgcacactccggggtgtgtcccttgcgttcgcgagggtaacacctcgaggtgttggtggcggtgacccccacggtggccaccagggacggcaaactccccacaacgcagcttcggcgccacatcgatctgcttgtcgggagcgccaccctttgctcggccctctacgtgggggacctgtgcggtctgtctttcttgtcggccaactgttcaccttttctcccaggcgccactggacaacgcaagattgcaattgttctatgtatcccggccatataacgggtcaccgcatggcatgggatatgatgatgaactggtcccctacgcggcgttggtggtagctcagctgctccggatcccacaagccatcatggacatgatcgctggtgctcactggggagtcctggcgggcatagcgtatttctccatggtggggaactgggcgaaggtcctgtagtgctgctgctatttgccggcgtcgacgcggaaacccacgtcaccgggggaagtgccggccataccgtgtctgggttcgctgggctcttcacaacaggacccaagcagaatatccaactgatcaacaccaacggcagtggcacatcaatagcacggccttgaactgcaatgataccctcaacaccggctggatagcagggctcctctatcaccacaaattcaactcttcgggctgttccgagaggttggccagctgccgacgcctaccgatttttctcagggctggggccccatcagttatgccaacggaagcgggcccgaccaacggccctactgctggcactaccccccaaagccttgtactattgtgcccgcaaagaacgtgtgtggcccagtatattgcttcctcccagccctgtggtggtgggaacgaccgacaggtcgggcgcgcctacctacagctggggtgaaaaagagacggacgtcttcgtccttaacaacaccaggccaccgctgggcaactggtttggttgacctggatgaactcaactggattcaccaaagtgtgcggtgcgcccccttgtgtcatcggaggggtgggcaacaacaccttgctctgccccactgactgtttccgcaagcatccggaagccacatactctcggtgcggctccgtccctggatcacacccaggtgcatggtcgactacccgtataggctttggcattatccctgtaccatcaactataccagattcaaagtcaggatgtacgtgggaggggtcgagcacaggctagatgcgcctgcaactggacgcggggcgagcgctgtgatctggaagacagggacaggtccgagctcagcccattgctgctgtccactacacagtggcaagtccttccgtgttctttcacgaccctgccagccttgtccaccggcctctccacctccaccagaacattgtggacgtgcagtacttgtacggggtggggtcaagcatcgcgtcctgggccattaagtgggagtacgtcattctcctgtttcttctgctcgcagacgcgcgcgtctgtcctgcttgtggatgatgttactcatatcccaagcggaggcggctttggagaacctcgtaatacttaatgcagcatccctggccgggacgcacggtctcgtgtccttcctcacgttcttctgctttgcgtggtatctgaaggtaggtgggtgcccggagcggtctacgccctctacgggatgtggcctctcctcctgctcctgttggcgctgcctcagcgagcgtacgcactggacacggaggtggccgcgtcgtgtggcggcgcaatcttgtcgggttaatggcgctgactctgtcaccatattataagcgctacatcagcttgtgcttgtggtggcttcagtatcttctgaccagggtagaagcgcaactgcacgtgtgggttccccccctcagcgtccgagggggggtgatgccgtcatcttactcatgtgtgttgtacacccgactttgctatttgacatcaccaaactactgctggccatcttcggacccctttggattcttcaagccagtttgctcagagtcccctacttgtgcgcgttcaaggccttctccggatctgtgcgctagcgcgggagatggttggaggtcattacgtgcagatggccatcatcaagttaggggcgcttaccggcacctatgtttataaccaccttactcctcttcgggactggcgcacaacggcctgcgagatctggccgtggctgtggaaccagtcgtcttctcccgaatggagaccaagctcatcacgtggggggcagacaccgccgcgtgcggtgacatcatcaacggcttgcccgttccgcccgtaggggccgggagatactgcttggaccagccgacggaatggtctccaaggggtggaggttgctggcgcccatcacggcgtacgcccagcagacgagaggcctcctagggtgcataatcaccagcctgaccggcgggacaaaaaccaagtggagggtgaggttcagatcgtgtcaactgctgcccaaaccttcttggcaacgtgcatcaatggggtatgctggactgtctaccacggggctggaacgaggaccatcgcatctccaagggtcctgttatccagatgtataccaatgtagaccaagaccttgtgggctggcccgctcctcaaggctcccgctcactgacaccctgcacctgcggctcctcggacctttacctggtcacgaggcacgccgatgtcttcccgtgcgccggcggggtgatagcaggggcagcctgctttcgccccggcccatttcctacttgaagggctcctcggggggtccgctgttgtgccccgcgggacacgccgtgggcatatttagggcgcggtgtgcacccgtggagtggctaaggcggtggacttcatccccgtggagaacctagagacaaccatgagatccccggtgttcacggacaactcctccccaccagcagtgccccagagcttccaggtggcccacctgcatctcccaccggcagcggtaagagcaccaaggtcccggccgcatacgcagctcagggctacaaggtgttagtgctcaacccctctgttgctgcaacattgggttttggcgcttacatgtccaaggcccaggggtcgatcctaatatcaggactggggtgagaacaattaccactggcagccccatcacgtactccacctacggcaagttccttgccgacggcgggtgctcggggggtgcttatgacataataatttgcgacgagtgccatccacggatgccacatccatcttgggcatcggcaccgtccttgaccaagcagagactgcgggagcgagactggttgtgctcgccactgctacccctccgggctccgtcactgtgccccatcctaacatgaggaggttgctctgtccactaccggagagatccccttttacggcaaggctatccccctcgaggtgatcaaggggggaagacatctcatcttctgccactcaaagaagaagtgcgatgagctcgccgcaaagctggtcgcataggcgtcaatgccgtggcctactaccgcggtcttgacgtgtctgtcatcccgaccagcggcgacgtcgtcgtcgtggcgactgatgccctcatgactggctataccggcgacttcgactccgtgatgactgcaacacgtgtgtcacccagacagtcgatttcagccttgaccctaccttcaccattgagacaaccacgctcccccaggacgctgtctcccggactcaacgtcggggcaggactggtagggggaagccaggcatctacgatttgtggcaccgggagagcgtccctccggcatgttcgactcgtccgtcctctgtgagtgctatgacgcgggctgtgcttggtacgagctcacgcccgccgagactacagttaggctgcgagcgtaatgaacaccccggggcttcccgtgtgccaggatcatcttgaattttgggagggcgtctttacgggcctcactcatatagatgcccactttctatcccagacaaagcaaggtggggagaactttccttacctggtagcgtacaagccaccgtgtgcgctagggctcaagcccctcccccatcgtgggaccagatgtggaagtgcttgatccgcctcaaacccacccttcatgggccaacacccctgctatacagactgggcgctgttcaaatgaagtcaccctgacgcacccaatcaccaaatacatcatgacatgcatgtcggctga

SEQ ID NO: 711 - DNA, 4869 bp, Hepatitis C virus
tcgcccacaggacgtcaagttcccgggtggcggtcagatcgttggtggagtttacttgttgccgcgcaggggccctagattgggtgtgcgcgcgacgaggaagacttccgagcggtcgcaacctcgagtagacgtcagcctatccccaaggctcgtcggcccgagggcaggacctgggctcagcccgggtacccttggcctctctacggcaatgagggttgcggttgggcgggatggctcctgtctccccgcggtctcggcctagctggggccccacagacccccggcgtaggtcgcgcaatttgggtaaggtcatcgataccctcacgtgtggcttcgccgatctcatggggtacataccgctcgtcggcgcccctcttggaggcgctgccaggccctggcgcatggcgtccgggttctggaagacggcgtgaattatgcaacagggaatcttcctggttgctctttctctatcttccttctggccctgctttcttgcctgactgtgcccgcttcagcctacatgtgcgcaactcctcggggctttaccatgtcaccaatgattgccctaactcgagtattgtgtacgaggcgggtgatgccatcctacacactccggggtgtgtcccttgcgttcgcgagggtaacgcctcgaggtgttggtggcggtgacccccacggtggccaccagggacggcaaactccccacaacgcagcttcggcgccacatcgatctgcttgtcgggagcgccaccctttgctcggccctctacgtgggggacctgtgcggtctgtctttcttgtcggccaactgttcaccttttctcccaggcgccactggacaacgcaagattgcaactgttctatgtatcccggccatataacgggtcaccgcatggcatgggatatgatgatgaactggtcccctacacggcgttggtggtagctcagctgctccggatcccgcaagccatcatggacatgatcgctggtgctcactggggagtcctggcgggtatagcgtatttctccatggtggggaactgggcgaaggtcctgtagtgctgctgctatttgccggcgtcgacgcgggaacccacgtcaccgggggaagcgtcggccgtaccgcgtctgggcttactagtttcttctcaccaggcgccaagcagaatatccaactgatcaacaccaacggcagtggcacatcaatagcacggccttgaactgcaatgatagcctcaacaccggctggatagcagggctcttctattaccacaaattcaactcttcaggctgttccgagaggttggccagctgccgacgcctaccgatttttcccagggctggggccctatcagttacgccaacggaagcgggcccgaccaacggccctactgctggcactaccccccaaaaccttgtggtattgtgtccgcaaagagcgtgtgtggcccagtatattgcttcctcccagccctgtggtggtgggaacgaccgacaagttgggcgcgcctacctacaactggggtggaaaagatacggacgtcttcgtccttaacaacaccaggccaccgttgggcaactggtttggttgacctggatgaactcatctggattcaccaaagtgtgtggggcgcccccctgtgtcatcggaggggtgggcaacaacaccttgctctgccccactgattgtttccgcaagcatccggaagccacatactctcggtgcggctccgtccttggatcacacccaggtgcatggtcgactacccgtataggctttggcattatccttgtaccatcaactacaccatatttaaagtcaggatgtacgtgggaggggtcgagcacaggctggatgcgcctgcaactggacgcggggcgaacgctgtggtctggaagacagggacaggtccgagctcagcccattgctgctgtccaccacacagtggcaagtccttccgtgttctttcacgaccctgccagccttgtccaccggcctctccaccttcaccagaacattgtggacgtgcagtacttgtacggggtggggtcaagcatcgcgtcttgggccgtcaggtgggagtacgtcgttctcctgtttcttctgctcgcagacgcgcgcgtctggcctgcttgtggatgatgttactcatatcccaagcggaggcggccttggagaacctcgtaatgctcaatgcagcatccctggccgggacgcacggtcttgtgtccttcctcgtattcttctgctttgcgtggtatctgaaggtaggtgggtgcccggagcggtctacgccctctacggaatgtggcctctcctcctgctcctgctggcgctgcctcagcgagcatacgcactggacacggaggtggccgcgtcgtgtggcggcgttgtcttgtcgggttaatggcgctgactctgtcaccatattataagcgctacatcggcttgtgcttgtggtggcttcagtatcttctgaccagggtggaagcgcaactgcacgtgtgggttccccccctcaacgtccgagggggggtgatgccgtcatcttactcatgtgtgctgtatacccgactttggtatttgacatcaccaaactactgctggccatcttcggacccctttggattcttcaagccagtttgctcaaagtcccctacttgtgcgcgttcaaggccttctccggatctgcgcgttagcgcggaagatggttgggggtcattacgtgcagatggctatcatcaagttaggggcgctcaccggcacctatgtttataaccacctcactcctcttcgggactggcgcacaacggcctgcgagatctggccgtggctgtggaaccagtcgtcttctcccgaatggagaccaagctcatcacgtggggggctgacactgccgcgtgcggtgatatcatcagcggcttgcccgttccgctcgtaggggccgggagatactgcttggaccagccgacggaatggtctccaaggggtggagattgctggcgcccatcacggcgtacgcccagcagacgagaggcctcctagggtgcataatcaccagcctgactggcgggacaaaaatcaagtggagggtgaggtccagatcgtgtcaactgctgcccaaaccttcctggcaacgtgcatcaatggggtatgctggactgtctaccacggggccggaacgagaaccatcgcatccccaagggtcctgttatccagatgtataccaatgtggaccaagaccttgtgggctggcccgctcctcatggctcccgctcactgacaccctgcacctgcggctcctcggacctttacctggtcacgaggcatgccgatgtcttcccgtgcgccggcggggcgatagcaggggcagcctgctttcaccccggcccatttcctacttgaaaggctcctcggggggtccgctgttgtgccccgcggggcacgccgtaggcatattcagggcgcggtgtgcacccgtggagtggctaaggcggtggacttcatccccgtggagaacctagagacaaccatgagatccccggtgttcacggacaactcctccccaccagcagtgccccagagcttccaggtggcccacctgcatctcccaccggcagcggtaagagcactaaggttccggccgcgtacgcagctcagggctacaaggtgttagtgctcaatccctctgttgctgctacattgggctttggcgcttacatgtccaaggcccaggggtcgatcctaatatcaggactggggtgagaacaattaccactggcagccccatcacgtattccacctacggcaagttcctcgccgacggcgggtgctcggggggtgcttatgacataataatttgcgatgagtgccacccacggatgccacatctatcttgggcatcggcaccgtccttgaccaagcagagactgcgggagcgagactggttgtgctcgccactgctacccctccgggctccgtcactgtgccccatcctaacatgaggaggttgctctgtccactaccggagagatccccttttacggcaaggctatccccctcgaggtgatcaaggggggaagacatctcatcttctgtcactcaaagaagaagtgcgatgagctcgccgcaaagctggtcgcatgggcgtcaacgccgtggcctactaccgcggtcttgacgtgtctgtcatcccaaccagcggcgacgtcgtcgtcgtggcgactgatgccctcatgactggctataccggcgacttcgactccgtgatgactgcaacacgtgtgtcacccagacagtcgatttcagccttgaccctaccttcaccattgagacaaccacgctcccccaggatgctgtctcccggactcaacgtcggggcaggactggtagggggaagccaggcatctacgatttgtggcaccgggggagcgcccctccggcatgttcgactcgtctgtcctctgcgagtgctatgacgcgggctgtgcttggtatgagctcacgcccgctgagactacggttaggctacgagcgtaatgaacaccccggggcttcccgtgtgccaggatcatcttgaattttgggagggcgtctttacgggcctcactcatatagatgcccactttctatcccagacaaagcaaggtggggagaactttccttacctggtagcgtacaagccaccgtgtgcgctagggctcaagcccctcccccatcgtgggaccagatgtggaagtgcttgatccgcctcaaacccaccctccatgggccaacacccctgctatacagactgggcgctgttcaaatgaagtcaccctgacgcacccaatcaccaaatacatcatgacatgcatgtcggctga

SEQ ID NO: 712 - DNA, 4866 bp, Hepatitis C virus
tcgcccacaggacgtcaagttcccgggtggcggtcagatcgttggtggagtttacttgttgccgcgcaggggccctagattgggtgtgcgcgcgacgaggaagacttccgagcggtcgcaacctcgagtagacgtcagcctatccccaaggctcgtcggcccgagggcaggacctgggctcagcccgggtacccttggcctctctacggcaatgagggttgcggttgggcgggatggctcctgtctccccgcggtctcggcctagctggggccccacagacccccggcgtaggtcgcgcaatttgggtaaggtcatcgataccctcacgtgtggcttcgccgatctcatggggtacataccgctcgtcggcgcccctcttggaggcgctgccaggccctggcgcatggcgtccgggttctggaagacggcgtgaattatgcaacagggaatcttcctggttgctctttctctatcttccttctggccctgctctcttgcctgactgtgcccgcttcagcctacatgtgcgcaactcctcggggctttaccatgtcaccaatgattgccctaactcgagtattgtgtacgaggcgggtgatgccatcctacacactccggggtgtgtcccttgcgttcgcgagggtaacgcctcgaggtgttggtggcggtgacccccacggtggccaccagggacggcaaactccccacaacgcagcttcgccacatcgatctgcttgtcgggagcgccaccctttgctcggccctctacgtgggggacctgtgcgggtcgtctttcttgtcggccaactgttcaccttttctcccaggcgccactggacgacgcaagattgcaactgttctatgtatcccggccatataacgggtcaccgcatggcatgggatatgatgatgaactggtcccctacggcgcgttggtggtagctcagctgctccggatcccgcaagccatcatggacatgatcgctggtgctcactggggagtcctggcgggcatagcgtatttctccatggtggggaactgggcgaaggtcctggtgtgctgttgctgtttgccggcgtcgacgcgggaacccacgtcaccgggggaagcgccggccgtaccgcgtctgggcttactagtttcttctcaccaggcgccaagcagaatatccaactgatcaacaccaacggcagttggacatcaatagcacggccttgaactgcaatgatagcctcaacaccggctggatagcagggctcttctattaccacaaattcaactcttcgggctgttccgagaggttggccagctgtcgacgccttacgatttttcccagggctggggccctatcagttacgccaacggaagcgggcccgaccaacggccctactgctggcactaccccccaaaaccttgtggtattgtgtccgcaaagagcgtgtgtggcccagtatattgcttcactccagccctgtggtggtgggaacgaccgacaagttgggcgcgcctacctacaactggggtggaaaggatacggacgtcttcgtccttaacaacaccaggccaccgttgggcaactggtttggttgtactggatgaactcatctggattcaccaaagtgtgcggggcgcccccctgtgtcatcggaggggtgggcaacaacaccttgctctgccccactgattgtttccgcaagcatccggaagccacatactctcggtgcggctccggtcttggatcacacccaggtgcatggtcgactacccgtataggctttggcattatccttgtaccatcaactacaccatatttaaagtcaggatgtacgtgggaggggtcgagcacaggctggatgctgctgcaactggacgcggggcgaacgctgtggtctggaagacagggacaggtccgagctcagcccattgctgctgtccaccacacagtggcaagtccttccgtgttctttcacgaccctgccagccttgtccaccggcctcatcaccttcaccagaacattgtggacgtgcagtacttgtacggggtggggtcaagcatcgcgtcctgggccgtcaggtgggagtacgtcgttctcctgtttcttctgctcgcagacgcgcgcgtctgcgctgcttgtggatgatgttactcatatcccaagcggaggcggccctggagaacctcgtaatgctcaatgcagcatccctggccgggacgcacggtcttgtgtccttcctcgtgttcttctgctttgcgtggtatctgaagggtggtgggtgcccggagcggtctacgccctctacggaatgtggcctctcctcctgctcctgctggcgctgcctcagcgagcatacgcgctggacacggaggtggccgcgtcgtgtggcggcgttgttctgtcgggttaatggcgctgactctgtcaccatattataagcgctacatcggcttgtgcttgtggtggcttcagtatcttctgaccagggtggaagcgcaactgcacgtgtgggttccccccctcaacgtccgaggggggcgtatgccgtcatcttactcatgtgtgctgtatacccgactttggtatttgacatcaccaaactactgctggccatcttcggacccctttggattcttcaagccagtttgctcaaagtcccctacttcgtcgcgttcaaggccttctccggatctgcgcgttagtgcggaagatggttggaggtcattacgtgcagatggctatcatcaagttaggggcgcttaccggcacctatgtttataaccacctcactcctcttcgggactgggcgacaacggcctgcgagatctggccgtggctgtggaaccagtcgtcttctcccgaatggagaccaagctcatcacgtggggggcagacactgccgcgtgcggtgatatcatcagcggcttgcccgtctcgcccgtaggggccgggagatactgcttggaccagccgacggaatggtctccaaggggtggagattgctggcgcccatcacggcgtacgcccagcagacgagaggcctcctagggtgcataatcaccagcctgactggccggacaaaaaccaagtggagggtgaggtccagatcgtgtcaactgctgcccaaaccttcctggcaacgtgcatcaatggggtatgctggactgtctaccacggggccggaacgagaaccatcgcatcaccaagggtcctgttatccagatgtataccaatgtggaccaagaccttgtgggctggcccgctcctcatggctcccgctcactgacaccctgcacctgcggctcctcggacctttatctggtcacgaggcatgccgatgtcgttccgtgcgccggcggggcgatagcaggggcagcctgctttcaccccggcccatttcctacttgaaaggctcctcggggggtccgctgttgtgccccgcggggcacgccgtgggcatattcagggccgcgtgtgcacccgtggagtggctaaggcggtggacttcatccccgtggagaacctagagacaaccatgagatccccggtgttcacggacaactcctccccaccagcagtgccccagagcttccaggtggcccacctgcatgctccaccggcagcggtaagagtaccaaggtcccggccgcgtacgcagctcagggctacaaggtgttagtgctcaatccctctgttgctgcaacattgggctttggcgcttacatgtccaaggcccatgggtcgatcctaatatcaggactggggtgagaacaattaccactggcagccccatcacatattccacctacggcaagttcctcgccgacggcgggtgctcggggggtgcttatgacataataatttgcgatgagtgccactcccggatgccacatctatcttgggcatcggcaccgtccttgaccaagcagagactgcgggagcgagactggttgtgctcgccactgctacccctccgggctccgtcactgtgccccatcctaacatcgagaggttgctctgtccactaccggagagatccccttttacggcaaggctatccccctcgaggtgatcaaggggggaagacatctcatcttctgtcactcaaagaagaagtgcgatgagctcgccgcaaagctggtcgcattggcgtcaatgccgtggcctactaccgcggtcttgacgtgtctgtcatcccaaccagcggcgacgtcgtcgtcgtggcgactgatgccctcatgactggctataccggcgacttcgactccgtgatagatgcaacacgtgtgtcacccagacagtcgatttcagccttgaccctaccttcaccattgagacaaccacgctcccccaggatgctgtctcccggactcaacgtcggggcaggactggtagggggaagccaggcatctacagattgtggcaccgggggagcgcccctccggcatgttcgactcgtctgtcctctgtgagtgctatgacgcgggctgtgcttggtatgagctcacgcccgctgagactacggttaggctacgagcgtacataacaccccggggcttcccgtgtgccaggatcatcttgaattttgggagggcgtctttacgggcctcactcatatagatgcccactttctatcccagacaaagcaaggtggggagaactttccttacctggtagcgtaccaaccaccgtgtgcgctagggctcaagcccctcccccatcgtgggaccagatgtggaagtgcttgatccgcctcaaacccaccctccatgggccaacacccctgctatacagactgggcgctgttcagaagaagtcaccctgacgcacccaatcaccaaatacatcatgacatgcatgtcggctga

SEQ ID NO: 713 - DNA, 4869 bp, Hepatitis C virus
tcgcccacaggacgtcaagttcccgggtggcggtcagatcgttggtggagtttacttgttgccgcgcaggggccctagattgggtgtgcgcgcgacgaggaagacttccgagcggtcgcaacctcgagcagacgtcagcctatccccaaggctcgtcggcccgagggcaggacctgggctcagcccgggtacccttggcctctctacggcaatgagggttgcggttgggcgggatggctcctgtctccccgcggtctcggcctagctggggccccacagacccccggcgtaggtcgcgcaatttgggtaaggtcatcgataccctcacgtgtggcttcgccgatctcatggggtacataccgctcgtcggcgcccctcttggaggcgctgccaggccctggcgcatggcgtccgggttctggaagacggcgtgaattatgcaacagggaatcttcctggttgctctttctctatcttccttctggccctgctttcttgcctgactgtgcccgcttcagcctacatgtgcgcaactcctcggggctttaccatgtcaccaatgattgccctaactcgagtattgtgtacgaggcgggtgatgccatcctacacactccggggtgtgtcccttgcgttcgcgagggtaacgcctcgaggtgttggtggcggtgacccccacggtggccaccagggacggcaaactccccacaacgcagcttcggcgccacatcgatctgcttgtcgggagcgccaccctttgctcggccctctacgtgggggacctgtgcggtctgtctttcttgtcggccaactgttcaccttttctcccaggcgccactggacaacgcaagattgcaactgttctatgtatcccggccatataacgggtcaccgcatggcatgggatatgatgatgaactggtcccctacacggcgttggtggtagctcagctgctccggatcccgcaagccatcatggacatgatcgctggtgctcactggggagtcctggcgggtatagcgtatttctccatggtggggaactgggcgaaggtcctgtagtgctgctgctatttgccggcgtcgacgcgggaacccacgtcaccgggggaagcgtcggccgtaccgcgtctgggcttactagtttcttctcaccaggcgccaagcagaatatccaactgatcaacaccaacggcagtggcacatcaatagcacggccttgaactgcaatgatagcctcaacaccggctggatagcagggctcttctattaccacaaattcaactcttcaggctgttccgagaggttggccagctgccgacgcctaccgatttttcccagggctggggccctatcagttacgccaacggaagcgggcccgaccaacggccctactgctggcactaccccccaaaaccttgtggtattgtgtccgcaaagagcgtgtgtggcccagtatattgcttcctcccagccctgtggtggtgggaacgaccgacaagttgggcgcgcctacctacaactggggtggaaaagatacggacgtcttcgtccttaacaacaccaggccaccgttgggcaactggtttggttgacctggatgaactcatctggattcaccaaagtgtgtggggcgcccccctgtgtcatcggaggggtgggcaacaacaccttgctctgccccactgattgtttccgcaagcatccggaagccacatactctcggtgcggctccgtccttggatcacacccaggtgcatggtcgactacccgtataggctttggcattatccttgtaccatcaactacaccatatttaaagtcaggatgtacgtgggaggggtcgagcacaggctggatgcgcctgcaactggacgcggggcgaacgctgtggtctggaagacagggacaggtccgagctcagcccattgctgctgtccaccacacagtggcaagtccttccgtgttctttcacgaccctgccagccttgtccaccggcctctccaccttcaccagaacattgtggacgtgcagtacttgtacggggtggggtcaagcatcgcgtcttgggccgtcaggtgggagtacgtcgttctcctgtttcttctgctcgcagacgcgcgcgtctggcctgcttgtggatgatgttactcatatcccaagcggaggcggccttggagaacctcgtaatgctcaatgcagcatccctggccgggacgcacggtcttgtgtccttcctcgtattcttctgctttgcgtggtatctgaaggtaggtgggtgcccggagcggtctacgccctctacggaatgtggcctctcctcctgctcctgctggcgctgcctcagcgagcatacgcactggacacggaggtggccgcgtcgtgtggcggcgttgtcttgtcgggttaatggcgctgactctgtcaccatattataagcgctacatcggcttgtgcttgtggtggcttcagtatcttctgaccagggtggaagcgcaactgcacgtgtgggttccccccctcaacgtccgagggggggtgatgccgtcatcttactcatgtgtgctgtatacccgactttggtatttgacatcaccaaactactgctggccatcttcggacccctttggattcttcaagccagtttgctcaaagtcccctacttgtgcgcgttcaaggccttctccggatctgcgcgttagcgcggaagatggttgggggtcattacgtgcagatggctatcatcaagttaggggcgctcaccggcacctatgtttataaccacctcactcctcttcgggactggcgcacaacggcctgcgagatctggccgtggctgtggaaccagtcgtcttctcccgaatggagaccaagctcatcacgtggggggctgacactgccgcgtgcggtgatatcatcagcggcttgcccgttccgctcgtaggggccgggagatactgcttggaccagccgacggaatggtctccaaggggtggagattgctggcgcccatcacggcgtacgcccagcagacgagaggcctcctagggtgcataatcaccagcctgactggcgggacaaaaatcaagtggagggtgaggtccagatcgtgtcaactgctgcccaaaccttcctggcaacgtgcatcaatggggtatgctggactgtctaccacggggccggaacgagaaccatcgcatccccaagggtcctgttatccagatgtataccaatgtggaccaagaccttgtgggctggcccgctcctcatggctcccgctcactgacaccctgcacctgcggctcctcggacctttacctggtcacgaggcatgccgatgtcttcccgtgcgccggcggggcgatagcaggggcagcctgctttcaccccggcccatttcctacttgaaaggctcctcggggggtccgctgttgtgccccgcggggcacgccgtaggcatattcagggcgcggtgtgcacccgtggagtggctaaggcggtggacttcatccccgtggagaacctagagacaaccatgagatccccggtgttcacggacaactcctccccaccagcagtgccccagagcttccaggtggcccacctgcatctcccaccggcagcggtaagagcactaaggttccggccgcgtacgcagctcagggctacaaggtgttagtgctcaatccctctgttgctgctacattgggctttggcgcttacatgtccaaggcccaggggtcgatcctaatatcaggactggggtgagaacaattaccactggcagccccatcacgtattccacctacggcaagttcctcgccgacggcgggtgctcggggggtgcttatgacataataatttgcgatgagtgccacccacggatgccacatctatcttgggcatcggcaccgtccttgaccaagcagagactgcgggagcgagactggttgtgctcgccactgctacccctccgggctccgtcactgtgccccatcctaacatgaggaggttgctctgtccactaccggagagatccccttttacggcaaggctatccccctcgaggtgatcaaggggggaagacatctcatcttctgtcactcaaagaagaagtgcgatgagctcgccgcaaagctggtcgcatgggcgtcaacgccgtggcctactaccgcggtcttgacgtgtctgtcatcccaaccagcggcgacgtcgtcgtcgtggcgactgatgccctcatgactggctataccggcgacttcgactccgtgatgactgcaacacgtgtgtcacccagatagtcgatttcagccttgaccctaccttcaccattgagacaaccacgctcccccaggatgctgtctcccggactcaacgtcggggcaggactggtagggggaagccaggcatctacgatttgtggcaccgggggagcgcccctccggcatgttcgactcgtctgtcctctgcgagtgctatgacgcgggctgtgcttggtatgagctcacgcccgctgagactacggttaggctacgagcgtaatgaacaccccggggcttcccgtgtgccaggatcatcttgaattttgggagggcgtctttacgggcctcactcatatagatgcccactttctatcccagacaaagcaaggtggggagaactttccttacctggtagcgtacaagccaccgtgtgcgctagggctcaagcccctcccccatcgtgggaccagatgtggaagtgcttgatccgcctcaaacccaccctccatgggccaacacccctgctatacagactgggcgctgttcaaatgaagtcaccctgacgcacccaatcaccaaatacatcatgacatgcatgtcggctga

SEQ ID NO: 714 - DNA, 5246 bp, Hepatitis C virus
tcactcccctgtgaggaactactgtcttcacgcagaaagcgtctagccatggcgttagtatgagtgtcgtgcagcctccaggaccccccctcccgggagagccatagtggtctgcggaaccggtgagacaccggaattgccaggacgaccgggtcctttcttggataaacccgctcaatgcctggagatttgggcgtgcccccgcaagaccgctagccgagtagtgttgggtcgcgaaaggccttgtggtactgcctgatagggtgcttgcgagtgccccgggaggtctcgtagaccgtgcaccatgagcacgaatcctaaacctcaaagaaaaaccaaacgtaaaccaaccgtcgcccacaggacgtcaagttcccgggtggcggtcagatcgttggtggagtttacttgttgccgcgcaggggccctagattgggtgtgcgcgcgacgaggaagacttccgagcggtcgcaacctcgaggtagacgtcagcctatccccaaggctcgtcggcccgagggcaggacctgggcgcagcccgggtacccttggcctctctatggaatgagggctgcgggtgggcgggatggctcctgtccccccgtggctctcggcctagctggggccccacagacccccggcgtaggtcgcgcaatttgggtaaggtcatcgataccctcacgtgcggcttcgccgacctcatggggtacataccgctcgtcggcgcccctcttggaggcgctgccagggccctggcgcatggcgtccgggttctggaagaggcgtgaattatgcaacagggaaccttcctggttgctctttctctatcttccttctggccctgctctcttgtctgaccgtgcccgcttcagcctaccaagtgcgcaactccacggggctttaccatgtcaccaatgattgccccaactcgagtattgtgtacgaggcggacgacaccatcctgcacactccggggtgcgtcccttgcgttcgcgagggaacgcctcgcggtgttgggtggcgatgtcccccacggtggccaccagggacggcaagctccccacaacacagcttcgacgacacatcgatctgtttgttgggggcgccaccctctgctcggccctctacgtgggggacttgtgcgggtctgtctttcttgtcggtcaactgttcactttctctcccaggcgccactggacgacgcaggactgcaattgtctatctatcccggccatataacgggtcaccgcatggcatgggatatgatgatgaactggtcccctacggcggcgttggtaacggctcagctgcttcggatcccgcaagccatcgtggacatgatcgctggtgctcactggggagtcctagcgggcatagcgtatttctccatggtggggaactgggcgaaggtcctggtagtgctgctgctgtttgcggcgtcgacgcgaccacctacaccaccgggggagcagccgcttccaccgcgtctagggtcgcaagtttctttgacctgggccctcagcagaacatccagctgatcaacaccaacggcagttggcacatcaacaggacggccctgaattgtaatgaaagcctcaacgccggctggttagcagggctcatctacttcagaaaattcaactcttcaggctgcctgagaggatggccagctgccgacccctcaccgactttgaccagggctggggccctatcagttacaccaatgggagtggccccgaccaccgcccttactgctggcactaccccccaaaaccttgtggtattgtgtctgcaaagagcgtgtgtggcccggtatactgcttcactcccagccctgtggtggtaggaacgaccgacaggttgggcgtgccacctacaactggggtgacaatgacacggacgtcttcgtccttaacaacaccaggccaccgctgggcaattggttcggttgcacctggatgaactcaactggattcaccaaagtgtgcggagcgcccccttgctccatcggaggggtgggcaacaacaccttgctctgccccactgattgtttccgcaagcatccggaagccacatactctcggtgcggtccggtccctggatcacacccaggtgcttagtcaactacccttacaggctttggcactatccttgtaccgtcaactacaccatattcaaggtcaggatgtacgtgggaggggtcgagcacaggctggaagctgcttgcaactggacgcgaggcgagcgttgcgatctagaagacagggacaggtccgagctcagcccgctgctgctgtccaccacacatggcaggtccttccatgttccttcacgaccctgccagccttgtccaccggcctcatccacctccaccaaaacattgtggacgtgcagtacttgtacggggtggggtcgagcattgtgtcctgggccgttaagtgggagtacgtcgttctcctattccttctgcttgcggacgcgcgcgtctgctcctgcttgtggatgatgttactcatatcccaagcgaggcagctttggagaacctcgtgatactcaatgcagcatccctggccgggacgcatggacttgtgcccttccttgtgtttttctgctttgcatggtatttgaagggtaagtgggtgcccggagcggcctacgtcctctacggaatgtggcccctcctcctgctcctgttagcgttgccccagcgggcatacgcgctggactcagaggcggccgcgtctgtggaggcgctgttcttgtcgggttgatggcgctcactctgtcaccatatttcaagcactatatcagctggtgcttgtggtggcttcagtattttctgaccagagcagaggcgcaattgcacatgtgggttccccccctcaacgttcgaggggggcgtgatgccatcatcttactcacgtgtgtcgtacacccggccttgatattcgacatcaccaactcctgcttgccgtcttcggtcccctctgggttcttcaggccagtttgctcaaagtaccctactttgtgcgcgttcaaggcctcctccggatctgtgcgttagtgcggaagatggccggaggccattacgtgcaaatggccatcatcaagttgggggcgcttactggcacctacatctacaaccatctcactcctcttcgggactgggcgcacaacggctgcgagatctggccgtggctgtagagccagtcgtcttctcccaaatggagaccaagctcatcacgtggggggcagacaccgccgcgtgcggtgacatcatcaacaacctgcccgtctccgcccgcaggggccaggagatactgctcggaccagccgatggaatggtctccaaggggtggagattgctagcgcccatcacggcgtacgcccagcagacaggggcctcctagggtgtataatcaccagcctgaccggccgggacaaaaaccaagtggagggtgaagtccagattgtgtcaactgccgcccaaaccttcctggcaacgtgcatcaatggggtatgctggactgtttaccacggggccggaacgaggaccatcgcatcacccaagggtcctgttatccagatgtataccaacgtagaccaggacctcgtggctggcccgcccctcaaggtgcccgctcattgacaccctgcacctgcggctcctcggacctttacctggttacgaggcacgccgatgtcattcccgtgcgccggcggggtgatagcaggggcagcctgctttcgcccaggcctatctcttacttgaagggctcctcggggggtccgctgttgtgccccgcgggacacgctgtcggcatattcagggcgcggtgtgcacccgtggagtggctaaagcggtggactttatccccgtggagaacctagagacaaccatgaggtccccggtgttcacggacaactcctctccgccagcagtgccccagagtttccaggtggcccatttgcatgctcccaccggcagcggtaagagcaccaaggtcccggctgcatacgcagcccagggctacaaggtgctagtgctcaaccctctgttgccgcaactcttggctttggtgcttatatgtccaaggcccatggggtcgaccctaacatcaggaccggggtgaggacaatcactactggcagccccatcacgtactcaacctacggcaagttccttgccgatggcgggtgctcggggggtgcctatgacataataatctgtgacgagtgccactccacggatgccacatccatcttgggatcggcactgtccttgaccaagcagagactgcgggggcgagactggtcgtgctcgccaccgctacccctccgggctctgtcaccgtgccccatcctaacatcgaggaggttgctctgtccaccaccggagagatccctttctatggcaaggctatcccccttgaggtaatcaagggggggagacatctcatcttctgccattcaaagaagaagtgcgagagctcgccgcaaagctggtcgcattgggcatcaatgccgtggcctactaccgcggtcttgacgtgtccgtcatcccgaccagcggtgatgttgtcgtcgtggcaaccgacgccctcatgactggctttaccggcgacttcgactcggtgatagactgcaacacgtgtgtcacccagacagtcgacttcagccttgaccctacttttacaattgagacaccacgctcccccaggatgctgtctcccgcactcagcgtcggggcaggactggtagggggaagcctggcatctatagatttgtggcaccgggggaacgcccctccggcatgttcgactcgtccgtcctctgtgagtgctatgacgcgggctgcgcttggtatgagctcacgcccgccgagactacagttaggctacgagcgtacatgaacaccccgggcttcccgtgtgccaggaccatcttgagttttgggagggcgtctttacgggccttacccatatagatgcccatttcctatcccagacaaagcagagcggggaaaactttccttacctggtagcgtaccaagccaccgtatgcgctagggctcaagcccctcccccatcgtgggaccagatgtggaagtgcctgatccgcctcaagcccactctccatggccaacacctctgctatacagactgggcgctgttcagaatgaagtcaccctgacgcacccaatcaccaagtacatcatgacatgcatgtcggccgacctggaggtc

SEQ ID NO: 715 - DNA, 5040 bp, Hepatitis C virus
tcactcccctgtgaggaactactgtcttcacgcagaaagcgtctagccatggcgttagtatgagtgtcgtgcagcctccaggaccccccctcccgggagagccatagtggtctgcggaaccggtgagacaccggaattgccaggacgaccgggtcctttcttggataaacccgctcaatgcctggagatttgggcgtgcccccgcaagaccgctagccgagtagtgttgggtcgcgaaaggccttgtggtactgcctgatagggtgcttgcgagtgccccgggaggtctcgtagaccgtgcaccatgagcacgaatcctaaacctcaaagaaaaaccaaacgtaaaccaaccgtcgcccacaggacgtcaagttcccgggtggcggtcagatcgttggtggagtttacttgttgccgcgcaggggccctagattgggtgtgcgcgcgacgaggaagacttccgagcggtcgcaacctcgaggtagacgtcagcctatccccaaggctcgtcggcccgagggcaggacctgggcgcagcccgggtacccttggcccctctatggaatgagggctgcgggtgggcgggatggctcctgtccccccgtggctctcggcctagctggggccccacagacccccggcgtaggtcgcgcaatttgggtaaggtcatcgatacccttacgtgcggcttcgccgacctcatggggtacataccgctcgtcggcgcccctcttggaggcgctgccagggccctggcgcatggcgtccgggttctggaagaggcgtgaattatgcaacagggaaccttcctggttgctctttctctatcttcctcctggccctgctctcttgtctgaccgtgcccgcttcagcctaccaagtgcgcaactccacggggctctaccatgtcaccaatgattgccccaactcgagtattgtgtacgaggcggacgacaccatcctacacactccggggtgcgtcccttgcgttcgcgagggaacgcctcgaggtgttgggtggcgatgtcccccacggtggccaccagggacggcaagctccccacaacgcagcttcgacgacacatcgatctgtttgttgggggcgccaccctctgctcggccctctacgtgggggacttgtgcgggtctgtctttcttgtcggtcaactgttcactttctctcccaggcgccactggacgacgcaggactgcaactgtctatctatcccggccatataacgggccaccgcatggcgtgggatatgatgatgaactggtcccctacggcggcgttggtaacggctcagctgcttcggctcccacaagccatcttggacatgatcgctggtgctcactggggagtcctagcgggcatagcgtatttctccatggtggggaactgggcgaaggtcctagtagtgctgttgctgtttgcggcgtcgacgcggacacctacaccaccgggggaacaatggcttccgccgcgtatggggttgcaagtctcttcaacgtaggccctaagcagaacatccagctgatcaacaccaacggcagttggcacatcaacagaacggccctgaactgtaatgaaagcctcaacgccggctggttagcagggctcctctacttccaaaaattcaactcttcaggctgcctgagaggatggccagctgccgacccatcaccgatttcgtccagggctggggccctatcagttacaccaatgggagtggccccgaccaccgcccttactgctggcactaccccccaaaaccttgtggtatcgtgcctgcaaagagcgtgtgtggcccggtatactgcttcactcccagccctgtggtggtgggaacgaccgacagactgggcgtgccacctacacctggggtgaaaatgacacggacgtcttcgtccttaacaacaccaggccaccgctgggcaattggttcggttgcacctggatgaactcaactggattcaccaaagtgtgcggagcgcccccttgctccatcggaggggtgggcaacaacaccttgctctgccccactgattgctttcgcaagcatccggaagccacatactctcggtgcggtccggtccctggatcacacccaggtgcttggtcaactacccttataggctttggcactatccttgtaccgtcaactacaccatattcaaggtcaggatgtacgtggggggggtcgagcacaggctggaagctgcctgcaactggacgcgaggcgagcgttgcgatctagaagacagggacaggtccgagctcagcccgctgctgctgtccaccactcatggcaggtccttccgtgttccttcacgaccctgccagccttgtccaccggcctcatccacctccaccaaaacattgtggacgtgcagtacttgtacggggtggggtcgagcattgtgtcctgggccgttaagtgggagtacgtcgttctcctcttccttctgcttgcagacgcgcgcgtctgctcctgcttgtggatgatgttactcatatcccaagcgaggcagctttggagaacctcgtaatactcaatgcagcatccctggccgggacgcacggacttgtgcccttcctcgtgttcttctgctttgcatggtatttgaagggtaagtgggtgcccggagcggcctacgtcctctacggaatgtggcctctcttcctgctcctgttagcgttgccccagcgggcatacgcactggactcagaggcggccgcgtctgtggcggcgctgttcttgtcgggttgatggcgctcactctgtcaccatatttcaagcactatatcagctggtgcttgtggtggcttcagtattttctgaccagagtagaggcgcaattgcacatgtgggttccccccctcaacgttcggggggggcgtgatgccatcatcttactcacgtgtgtcgtacacccgaccttgatattcgacatcaccaactgctgcttgccatcttcggtcccctctgggttcttcaggccagtttgcttaaggtaccctactttgtgcgcgttcaaggcctcctccggatctgcgcgctagtgcggaagatggccggaggccattacgtgcaaatggtcatcatcaagttgggggcgcttactggcacctacatctacaaccatctcactcctcttcgggactgggcgcacaacggctgcgagatctggccgtggctgtagagccagtcgtcttttcccaaatggagaccaagctcatcacgtggggggcagacaccgccgcgtgcggtgacatcatcaacaacctgcccgtctccgcccgcaggggccaggagatactgctcggaccagccgatggaatggtctccaaggggtggagattgctggcacccatcacggcgtacgcccagcagacaggggcctcctagggtgtataatcaccagcttgaccggccgggacaagaaccaagtggagggtgaagtccagattgtgtcaactgctgcccaaaccttcctggcaacgtgcatcaatggggtatgctggactgtttaccacggggctggaacaaggaccatcgcatcacccaagggtcctgttatccagatgtataccaacgtagaccaggacctcgtggctggcccgcccctcaaggtgcccgctcattgacaccctgcacctgcggctcctcggacctttacctggttacgaggcacgccgatgtcatccccgtgcgccggcggggtgacagcaggggcagcctgctttcgcccaggcctatctcttacttgaaaggctcctcggggggtccgctgttgtgccccgcgggacacgctgtcggcatcttcagggcgcggtgtgcacccgtggagtggctaaagcggtggactttatccccgtggagaacctagagacaaccatgaggtccccggtgttcacggacaactcctctccgccagcagtgccccagagttttcaggtggcccacttgcatgctcccaccggcagcggtaagagcaccaaggtcccggctgcgtacgcagcccagggctacaaggtgctagtgctcaaccctctgttgccgcaactcttggctttggtgcttatatgtccaaggcccatggggtcgaccctaacatcaggaccggggtgaggacaattaccactggcagccccatcacgtactcaacctacggcaagttccttgccgatggcgggtgctcggggggtgcctatgacataataatctgtgacgagtgccactccacggatgccacatccatcttgggatcggcactgtccttgaccaagcagagactgcgggagcgagactggtcgtactcgccactgctacccctccgggttctgtcactgtgccccatcctaacatcgaggaggttgctctgtccaccaccggagagatccctttctatggcaaggctatcccccttgaggtaatcaagggggggagacatctcatcttctgccattcaaagaagaagtgcgagagctcgccgcaaagctggtcgcattgggcatcaatgccgtggcctactaccgcggtctcgacgtgtccgtcattccgactagcggtgatgttgtcgtcgtggcaaccgatgccctcatgactggctataccggcgacttcgactcggtgatagactgcaacacgtgtgtcacccagacagtcgacttcagccttgaccctacttttacaattgagacaccacgcttccccaggatgctgtctcccgcactcagcgtcggggcaggactggcagggggaagcctggcgtctatagatttgtggcaccgggggaacgcccctccggcatgttcgactcgtccgtcctctgtgagtgctatgacgcgggctgcgcttggtatgagctcacgcccgccgagactacagttaggctacgagcgtacatgaacaccccgggcttcccgtgtgccaggaccatcttgagttttgggagggcgtctttacgggcctcacccatatagatgcccatttcctatcccagacaaagcagagcggggaaaactttccttacctg

SEQ ID NO: 716 - DNA, 5029 bp, Hepatitis C virus
tcactcccctgtgaggaactactgtcttcacgcagaaagcgtctagccatggcgttagtatgagtgtcgtgcagcctccaggaccccccctcccgggagagccatagtggtctgcggaaccggtgagacaccggaattgccaggacgaccgggtcctttcttggataaacccgctcaatgcctggagatttgggcgtgcccccgcaagaccgctagccgagtagtgttgggtcgcgaaaggccttgtggtactgcctgatagggtgcttgcgagtgccccgggaggtctcgtagaccgtgcaccatgagcacgaatcctaaacctcaaagaaaaaccaaacgtaaaccaaccgtcgcccacaggacgtcaagttcccgggtggcggtcagatcgttggtggagtttacttgttgccgcgcaggggccctagattgggtgtgcgcgcgacgaggaagacttccgagcggtcacaacctcgaggtagacgtcagcctatccccaaggctcgtcggcccgagggcaggacctgggcgcagcccgggtacccttggcctctctatggaatgagggctgcgggtgggcgggatggctcctgtccccccgtggctctcggcctagctggggccccacagacccccggcgtaggtcgcgcaatctgggtaaggtcatcgatacccttacgtgcggcttcgccgacctcatggggtacataccgctcgtcggcgcccctcttggaggcgctgccagggccctggcgcatggcgtccgggttctggaagaggcgtgaattatgcaacagggaaccttcctggttgctctttctctatcttccttctggccctgctctcttgtctgaccgtgcccgcttcagcctaccaagtgcgcaactccacggggctttatcatgtcaccaatgattgccccaactcgagtattgtgtacgaggcggacgacaccatcctgcacactccggggtgcgtcccttgcattcgcgagggaacgcctcgcggtgttgggtggcgatgtcccccacggtggccaccagggacggcaagctccccacaacgcagcttcgacgacacatcgatctgtttgttgggggcgccaccctctgctcggccctctacgtgggggacttgtgcgggtctgtctttcttgtcggtcaactgttcactttctctcccaggcgccactggacgacgcaggactgcaattgtctatctatcccggccatataacgggccaccgcatggcatgggatatgatgatgaactggtcccctacggcggcgttggtaacggctcagctgcttcggatcccacaagccatcgtggacatgatcgctggtgctcactggggagtcctagcgggcatagcgtatttctccatggtggggaactgggcgaaggtcctggtagtgctgctgctgtttgcggcgtcgacgcgaccacctacaccaccgggggggcagccgcttccaccgcgtctagggtcgcaagtttctttgacctgggccctcagcagaacatccagctgatcaacaccaacggcagttggcacatcaacagaacggtcctgaactgtaatgaaagcctcaacgccggctggttagcagggctcatctacttcagaaaattcaactcttcaggctgcctgagaggatggccagctgccgacccctcaccgacttcgaccagggctggggccctatcagttacaccaatgggagtggccccgaccaccgcccttactgctggcactaccccccaaaaccttgtggtattgtgcccgcaaagagcgtgtgtggcccggtatactgcttcactcccagtcctgtggtggtgggaacgaccgacaggttgggcgtgccacctacaactggggtgacaatgacacggacgtcttcgtccttaacaacaccaggccaccgctgggcaattggttcggttgcacctggatgaactcaactggattcaccaaaggtgtgcggagcgcccccttgctccatcggaggggtgggcaacaacaccttgctctgccccactgattgttttcgcaagcatccggaagccacatactctcggtgcgctccggtccctggatcacacccaggtgcttagtcaactacccttacaggctttggcactatccttgtaccgtcaactacaccatattcaaggtcaggatgtacgtgggaggggtcgagcacaggctggaagctgcttgcaactggacgcgaggcgagcgttgcgatctagaagacagggacaggtccgagctcagcccgctgctgctgtccaccacacgtggcaggtccttccgtgttccttcacgaccctgccagccttgtccaccggcctcatccacctccaccaaaacatcgtggacgtgcagtacttgtacggggtggggtcgagcattgtgtcctgggctgttaagtgggagtacgtcgttctcctattccttctgcttgcggacgcgcgcgtctgctcctgcttgtggatgatgttactcatatcccaagggaggcagctctggagaacctcgtgatactcaatgcagcatccctggccgggacgcatggacttgtgcccttccttgtgttcttctgctttgcatggtatttgaagggtaagtgggtgcccggggcggcctacgtcctctacggaatgtggcctctcctcctgctcctgttagcgttgccccagcgggcatacgcgctggactcagaggcggccgcgtgtgtggaggcgctgttcttgtcgggttgatggcgctcactctgtcgccatatttcaagcactatatcagctggtgcttgtggtggcttcagtattttctgaccagagcagaggcgcaattgcacatgtgggttccccccctcaacgttcgaggggggcgtgatgccatcatcttactcacgtgtgtcgtacacccggccttgatattcgacatcaccaactgctgcttgccgtcttcggtcccctctgggttcttcaggccagcttgcttaaagtaccctactttgtgcgcgttcaaggcctcctccggatctgtgcgctagtgcggaagatggccggaggccattacgtgcaaatggccatcatcaagttgggggcgcttactggcacctacatttacaaccatctcactcctcttcgggactgggcgcacaacgcctgcgagatctggccgtggctgtagagccagtcgtcttctcccaaatggagaccaagctcatcacatggggggcagacaccgccgcgtgcggtgacatcatcaacaacctgcccgtctccgcccgcaggggccaggagatactgctcggaccagccgatggaatggtctccaaggggtggcgattgctagcgcccatcacggcgtacgcccagcagaaaggggcctcctagggtgtataatcaccagcctgaccggccgggacaaaaaccaagtggagggtgaagtccagattgtgtcaactgctgcccaaaccttcctggcaacgtgcatcaatggggtatgttggactgtctaccacggggccggaacgaggaccatcgcatcacccaagggtcctgttatccagatgtataccaacgtagaccaggacctcggggctggcccgcccctcaaggtgcccgctcattgacaccctgcacctgcggctcctcggacctttacctggttacgaggcacgccgatgtcattcccgtgcgccggcggggtgatagcaggggcagcctgctttcgcccaggcctatctcttacttgaagggctcctcggggggtccgctgttgtgccccgcgggacacgccgtcggcatattcagggcgcggtgtgcacccgtggagtggctaaagcggtggactttatccccgtggagaacctagagacaaccatgaggtccccggtgttcacggacaactcctctccgccagcagtgccccagagtttccaggtggcccacttgcatgctcccaccggcagcggcaagagcaccaaggtcccggctgcatacgcagcccagggctacaaggtgctagtgctcacccctctgttgccgcaactcttggctttggtgcttatatgtccaaggcccatggggtcgaccccaacatcaggaccggggtgaggacaatcactactggcagccccatcacgtactcaacctacggcaagttccttgccgatggcgggtgctcggggggtgcctatgacataataatctgtgacgagtgccactccacggatgccacatccatcttggcatcggcactgtccttgaccaagcagagactgcgggggcgagactggtcgtgctcgccaccgctacccctccgggctctgtcactgtgccccatcctaacatcgaggaggttgctctgtccaccaccggagagatccctttctatggcaaggctatcccccttgaggtaatcaagggggggagacatctcatcttctgccattcaaagaagaagtgcgcgagctcgccgcaaagctggtcgcattgggcatcaatgccgtggcctactaccgcggtctcgacgtgtccgtcatcccgaccagcggtgatgttgtcgtcgtggcaaccgacgccctcatgactggctttaccggcgacttcgactcggtgatagactgcaacacgtgtgtcacccagacagtcgacttcagccttgaccctacttttacaattgagaaaccacgcttccccaggatgctgtctcccgcactcagcgtcggggcaggactggcagggggaagcctggcatctatagatttgtggcaccgggggaacgcccctccggcatgttcgactcgtccgtcctctgtgagtgctatgacgcgggctgcgcttggtatgagctcacgcccgccgagactacagttaggctacgagcgtacatgaacaccccgggcttcccgtgtgccaggaccatcttgagttttgggagggcgtctttacgggcctcacccatatagatgcccatttcctatcccagacaaagcagagcggggaaaac

SEQ ID NO: 717 - DNA, 5246 bp, Hepatitis C virus
tcactcccctgtgaggaactactgtcttcacgcagaaagcgtctagccatggcgttagtatgagtgtcgtgcagcctccaggaccccccctcccgggagagccatagtggtctgcggaaccggtgagacaccggaattgccaggacgaccgggtcctttcttggataaacccgctcaatgcctggagatttgggcgtgcccccgcaagaccgctagccgagtagtgttgggtcgcgaaaggccttgtggtactgcctgatagggtgcttgcgagtgccccgggaggtctcgtagaccgtgcaccatgagcacgaatcctaaacctcaaagaaaaaccaaacgtaaaccaaccgtcgcccacaggacgtcaagttcccgggtggcggtcagatcgttggtggagtttacttgttgccgcgcaggggccctagattgggtgtgcgcgcgacgaggaagacttccgagcggtcgcaacctcgaggtagacgtcagcctatccccaaggctcgtcggcccgagggcaggacctgggcgcagcccgggtacccttggcccctctatggaatgagggctgcgggtgggcgggatggctcctgtccccccgtggctctcggcctagctggggccccacagacccccggcgtaggtcgcgcaatttgggtaaggtcatcgatacccttacgtgcggcttcgccgacctcatggggtacataccgctcgtcggcgcccctcttggaggcgctgccagggccctggcgcatggcgtccgggttctggaagaggcgtgaattatgcaacagggaaccttcctggttgctctttctctatcttccttctggccctgctttcttgtctgaccgtgcccgcttcagcctaccaggtgcgcaactccacggggctttaccatgtcaccaatgattgccccaactcgagtattgtgtacgaggcggacgacaccatcctgcacactccggggtgcgtcccttgcgttcgcgagggaacgcctcgaggtgttgggtggcgatgtcccccacggtggccaccagggacggcaagctccccacaacgcagcttcgacgacacatcgatctgtttgttgggggcgccaccctctgctcggccctctacgtgggggacttgtgcgggtctgtctttcttgtcggtcaactgttcactttctctcccaggcgccactggacgacgcaggactgcaattgtctatctatcccggccatataacgggccaccgcatggcatgggatatgatgatgaactggtcccctacggcggcgttggtaacggctcagctgcttcggatcccacaagccatcgtggacatgatcgctggtgctcactggggagtcctagcgggcatagcgtatttctccatggtggggaactgggcgaaggtcctggtagtgctgctgctgtttgcggcgtcgacgcgaccacctacaccaccgggggagcagccgcttccaccgcgtctaaggtcgcaagtttctttgacatgggccctaagcagaacatccagctgatcaacaccaacggcagttggcacatcaacagaacggccctgaactgtaatgaaagcctcaacgccggctggttagcagggctcatctacttcagaaaattcaactcttcaggctgcctgagaggatggccagctgccgacccctcaccgatttcgaccagggctggggccctatcagttacaccaatgggagtggtcccgaccaccgcccttactgctggcactaccccccaaaaccttgtggtattgtgcccgcaaagagcgtgtgtggcccggtatactgcttcactcccagccctgtggtggtggggacgaccgacaggttgggcgtgccacctacaactggggtgacaatgacacggacgtcttcgtccttaacaacaccaggccaccgctgggcaattggttcggttgcacctggatgaactcaactggtttcaccaaagtgtgcggagcgcccccttgctccatcggaggggtgggcaacaacaccttgctctgccccactgattgttttcgcaagcatccggaagccacatactctcggtgcggtccggtccctggatcacacccaggtgcttagtcaactacccttataggctttggcactatccttgtaccgtcaactacaccatattcaaggtcaggatgtacgtgggaggggtcgagcacaggctggaagctgcttgtaactggacgcgaggcgagcgttgcgatctagaagacagggacaggtccgagctcagcccgctgctgctgtccaccacacatggcaggtccttccgtgttccttcacgaccctgccagccttgtccaccggcctcatccacctccaccaaaacattgtggacgtgcagtacttgtacggggtggggtcgagcattgtgtcctgggccgttaagtgggagtacgtcgttctcctattcctcctgcttgcggacgcgcgcgtctgctcctgcttgtggatgatgttactcatatcccaagcgaggcagctttggagaacctcgtaatactcaatgcagcatccctggccgggacgcacggacttgtgcccttcctcgtgttcttctgctttgcatggtatctgaagggtaagtgggtgcccggagcggcctacgtcctctacggaatgtggcctctcctcctgctcctgttagcgttgccccagcgggcatacgcgctggactcagaggcggccgcgtctgtggaggcgctgttcttgtcgggctgatggcgctcactctgtcaccatatttcaagcactatatcagctggtgcttgtggtggcttcagtattttctgaccagagtagaggcgcaattgcacatgtgggttccccccctcaacgttcgaggggggcgtgatgccatcatcttactcacgtgcgtcgtacacccgaccttgatattcgacatcactaactgctgcttgccgtcttcggtcccctctgggttcttcaggccagtttgcttaaggtaccctactttgtgcgcgttcaaggcctcctccggatctgtgcgctagtgcggaagatggtcggaggccattacgtgcaaatggccatcatcaagttgggggcgcttactggcacctacatctacaaccatctcactcctcttcgggactgggcgcacaacggctgcgagatctggccgtggctgtagagccagtcgtcttctcccaaatggagaccaagctcatcacgtggggggcagacaccgccgcgtgcggtgacatcatcaacaacctgcccgtctccgcccgcaggggccaggagatactgctcggaccagccgatggaatggtctccaaggggtggagattgctggcacccatcacggcgtacgcccagcagacaggggcctcctagggtgtataatcaccagcctgaccggccgggacaaaaatcaagtggagggtgaagtccagattgtgtcaactgctgcccaaacctttctggcaacgtgcatcaatggggtatgctggactgtttaccacggggccggaacgaggaccatcgcatcacccaagggtcctgttatccagatgtacaccaacgtagaccaggacctcgtggctggcccgcccctcaaggtgcccgctcattgacaccctgcacctgcggctcctcggacctttacctggttacgaggcacgccgatgtcattcccgtgcgccggcggggtgatagcaggggcagcctgctttcgcccaggcctatctcttacttgaaaggctcctcggggggtccgctgttgtgccccgcgggacacgctgtcggcatattcagggcgcggtgtgcacccgtggagtggctaaagcggtagactttatccccgtggagaacctggagacaaccatgaggtccccggtgttcacggacaactcctctccgccagcagtgccccagagtttccaggtggcccacttgcacgctcccactggcagcggtaagagcaccaaggtcccggccgcatacgcagcccagggctataaggtgctagtgctcaaccctctgttgccgcaactcttggctttggtgcttatatgtccaaggcccatggggtcgaccctaacatcaggaccggggtgaggacaatcaccactggcagccccatcacgtactcaacctacggcaagttccttgccgatggcgggtgctcggggggtgcctatgacataataatctgtgacgagtgccactccacagatgccacatccatcttgggatcggcactgtccttgaccaagcagagactgcgggggcgagactggtcgtgctcgccaccgctacccctccgggctctgtcactgtgccccatcctaacatcgaggaggttgctctgtccaccaccggagagatccctttctatggcaaggctatcccacttgaggtaatcaagggggggagacatctcatcttttgccattcaaagaagaagtgcgagagctcgccgcaaagctggtcgcattgggcatcaatgccgtggcctactaccgcggtctcgacgtgtccgtcatcccgaccagcggtgacgttgtcgtcgtggcaaccgatgccctcatgactggctttaccggcgacttcgactcggtgatagactgcaacacgtgtgtcacccagacagtcgacttcagccttgaccccacttttacaattgagacaccacgcttccccaggatgctgtctcccgcactcagcgtcggggtaggactggcagggggaagcctggcgtctatagatttgtggcaccgggggaacgcccctccggcatgttcgactcgtccgtcctctgtgagtgctatgacgcgggctgtgcttggtatgagctcacgcccgccgagactacagttaggctacgagcgtacatgaacaccccgggcttcccgtgtgccaggaccatcttgagttttgggagggcgtctttacgggccttacccatatagacgcccatttcctatcccagacaaagcagagcggggaaaactttccttacctggtagcgtaccaagccaccgtatgcgctagggctcaagcccctcccccatcgtgggaccagatgtggaagtgcctgatccgcctcaaacccactctccatggccaacacctctgctatacagactgggcgctgttcagaatgaagtcaccctgacgcacccaatcaccaagtacatcatgacatgcatgtcggccgacctggaggtc

SEQ ID NO: 718 - DNA, 5247 bp, Hepatitis C virus
tcactcccctgtgaggaactactgtcttcacgcagaaagcgtctagccatggcgttagtatgagtgtcgtgcagcctccaggacccccccctcccgggagagccatagtggtctgcggaaccggtgatacaccggaattgccaggacgaccgggtcctttcttggataaacccgctcaatgcctggagatttgggcgtgcccccgcaagaccgctagccgagtagtgttgggtcgcgaaaggccttgtggtactgcctgatagggtgcttgcgagtgccccgggaggtctcgtagaccgtgcaccatgagcacgaatcctaaacctcaaagaaaaaccaaacgtacaccaaccgtcgcccacaggacgtcaagttcccgggtggcggtcagatcgttggtggagtttacttgttgccgcgcaggggccctagattgggtgtgcgcgcgacgaggaagacttccgagcggtcgcaacctcgaggtagacgtcagcctatccccaaggctcgtcggcccgagggcaggacctgggcgcagcccgggtacccttggcccctctatgcaatgagggctgcgggtgggcgggatggctcctgtccccccgtggctctcggcctagctggggccccacagacccccggcgtaggtcgcgcaatttgggtaaggtcatcgatacccttacgtgcggcttcgccgacctcatggggtacataccgctcgtcggcgcccctcttggaggcgctgccagggccctggcgcatggcgtccgggttctggaagcggcgtgaattatgcaacagggaaccttcctggttgctctttctctatcttcctcctggccctgctctcttgtctgaccgtgcccgcttcagcctaccaagtgcgcaactccacggggctctaccatgtcaccaatgattgccccaactcgagtattgtgtacgaggcggacgacaccatcctacacactccggggtgcgtcccttgcgttcgcgaggtaacgcctcgaggtgttgggtggcgatgtcccccacggtggccaccagggacggcaagctccccacaacgcagcttcgacgacacatcgatctgtttgttgggggcgccaccctctgctcggccctctacgtgggggacttgtgcgggtctgtctttcttgtcggtcaactgttcactttctctcccaggcgccactggacgacgcaggactgcaactttctatctatcccggccatataacgggccaccgcatggcatgggatatgatgatgaactggtcccctacggcggcgttggtaacggctcagctgcttcggctcccacaagccatcttggacatgatcgctggtgctcactggggagtcctagcgggcatagcgtatttctccatggtggggaactgggcgaaggtcctagtagtgctgttgctgtttgtggcgtcgacgcggacacctacaccaccgggggaacaatggcttccgccgcgtatggggttgcaagtctcttcaacgtaggccctaagcagaacatccagctgatcaacaccaacggcagttggcacatcaacagaacggccctgaactgtaatgaaagcctcaacgccggctggttagcagggctcctctacttccaaaaattcaactcttcaggcttcctgagaggatggccagctgccgacccatcaccgatttcgtccagggctggggccctatcagttacaccaatgggagtggccccgaccaccgcccttactgctggcactaccccccaaaaccttgtggtatcgtgcctgcaaagagcgtgtgtggcccggtatactgcttcactcccagccctgtggtagtgggaacgaccgacagactgggcgtgctacctacacctggggtgaaaatgacacggacgtcttcgtccttaacaacaccaggccaccgctgggcaattggttcggttgcacctggatgaattcaactggattcaccaaagtgtgcggagcgcccccctgctccatcggaggggtgggcaacaacaccttgctctgccccactgattgctttcgcaagcatccggaagccacatactctcggtgcgctccggtccctggatcacacccaggtgcttggtcaactacccttataggctttggcactatccttgtaccgtcaactacaccatattcaaggtcaggatgtacgtggggggggtcgagcacaggctggaagctgcctgcaactggacgcgaggcgagcgttgcgatctagaagacagggacaggtccgagctcagcccgctgctgctgtccaccactcgtggcaggtccttccgtgttccttcacgaccctgccagccttgtccaccggcctcatccacctccaccaaaacattgtggacgtgcagtacttgtacggggtggggtcgagcattgtgtcctgggccgttaagtgggagtacgtcgttctcctcttccttctgcttgcagacgcgcgcgtctgctcctgcttgtggatgatgttactcatatcccaagagaggcagctttggagaacctcgtaatactcaatgcagcatccctggccgggacgcacggacttgtgcccttcctcgtgttcttctgctttgcatggtacttgaagggtaagtgggtgcccggagcggcctacgtcctctacggaatgtggcctctcctcctgctcctgttagcgttgccccagcgggcatacgcactggactcagaggcggccgcgtgtgtggcggcgctgttcttgtcgggttgatggcgctcactctgtcaccatatttcaagcactatatcagctggtgcttgtggtggcttcagtactttctgaccagagtagaggcgcaattgcacatgtgggttccccccctcaacgttcgaggggggcgtgatgccatcatcttactcacgtgtgtcgtacacccgaccttgatattcgacatcaccaactgctgcttgccatcttcggtcccctctgggttcttcaggccagtttgcttaaggtaccctactttgtgcgcgttcaaggcctcctccggatctgcgcgctagtgcggaagatggccggaggccattacgtgcaaatggccatcatcaagttgggggcgcttactggcacctacatctacaaccatctcactcctcttcgggactgggcgcacaacgcctgcgagatctggccgtggctgtagagccagtcgtcttctcccaaatggagaccaagctcatcacgtggggggcagacaccgccgcgtgcggtgacatcatcaacaacctgcccgtctccgcccgcaggggccaggagatactgctcggaccagccgatggaatggtctccaaggggtggagattgctggcacccatcacggcgtacgcccagcagaaaggggcctcctagggtgtataatcaccagcttgaccggccgggacaagaaccaagtggagggtgaagtccagattgtgtcaactgctgcccaaaccttcctggcaacgtgcatcaatggggtatgctggactgtttaccacggggccggaacgaggaccatcgcatcacccaagggtcctgttatccagatgtataccaacgtagaccaggacctcggggctggcccgcccctcaaggtgcccgctcattgacaccctgcacctgcggctcctcggacctttacctggttacgaggcacgccgatgtcatccccgtgcgccggcggggtgatagcaggggcagcctgctttcgcccaggcctatctcttacttgaaaggctcctcggggggtccgctgttgtgccccgcgggacacgctgtcggcatcttcagggcgcggtgtgcacccgtggagtggctaaagcggtggactttatccccgtggagaacctagagacaaccatgaggtccccggtgttcacggacaactcctctccaccagcagtgccccagagtttccaggtggcccacttgcatgctcccaccggcagcggtaagagcaccaaggtcccggctgcatacgcagcccagggctacaaggtgctagtgctcacccctctgttgccgcaactcttggctttggtgcttatatgtccaaggcccatggggtcgaccctaacatcaggaccggggtgaggacaattaccactggcagccccatcacgtactcaacctacggcaagttccttgccgatggcgggtgctcggggggtgcctatgacataataatctgtgacgagtgccactccacggatgccacatccatcttggcatcggcactgtccttgaccaagcagagactgcgggagcgagactggtcgtactcgccaccgctacccctccgggttctgtcactgtgccccatcctaacatcgaggaggttgctctgtccaccaccggagagatccctttctatggcaaggctatcccccttgaggcaatcaagggggggagacatctcatcttctgccattcaaagaagaagtgcgcgagctcgccgcaaagctggtcgcattgggcatcaatgccgtggcctactaccgcggtctcgacgtgtccgtcattccgactagcggtgatgttgtcgtcgtggcaaccgatgccctcatgactggctataccggcgacttcgactcggtgatagactgcaacacgtgtgtcacccagacagtcgacttcagccttgaccctacttttacaattgagaaaccacgcttccccaggatgctgtctcccgcactcagcgtcggggcaggactggcagggggaagcctggcgtctatagatttgtggcaccgggggaacgcccctccggcatgttcgactcgtccgtcctctgtgagtgctatgacgcgggctgcgcttggtatgagctcacgcccgccgagactacagttaggctacgagcgtacatgaacaccccgggcttcccgtgtgccaggaccatcttgagttttgggagggcgtctttacgggcctcacccatatagatgcccacttcctatcccagacaaagcagagcggggaaaactttccttacctggtagcgtaccaagccaccgtgtgcgctagggctcaagcccctcccccatcgtgggaccagatgtggaagtgcctgatccgcctcaaacccactctccatgaccaacacctctgctatacagactgggcgctgtccagaatgaagtcaccctgacgcacccaatcaccaagtacatcatgacatgcatgtcggccgacctggaggtc

SEQ ID NO: 719 - DNA, 5246 bp, Hepatitis C virus
tcactcccctgtgaggaactactgtcttcacgcagaaagcgtctagccatggcgttagtatgagtgtcgtgcagcctccaggaccccccctcccgggagagccatagtggtctgcggaaccggtgagacaccggaattgccaggacgaccgggtcctttcttggataaacccgctcaatgcctggagatttgggcgtgcccccgcaagaccgctagccgagtagtgttgggtcgcgaaaggccttgtggtactgcctgatagggtgcttgcgagtgccccgggaggtctcgtagaccgtgcaccatgagcacgaatcctaaacctcaaagaaaaaccaaacgtaaaccaaccgtcgcccacaggacgtcaagttcccgggtggcggtcagatcgttggtggagtttacttgttgccgcgcaggggccctagattgggtgtgcgcgcgacgaggaagacttccgagcggtcgcaacctcgaggtagacgtcagcctatccccaaggctcgtcggcccgagggcaggacctgggcgcagcccgggtacccttggcctctctatggaatgagggctgcgggtgggcgggatggctcctgtccccccgtggctctcggcctagctggggccccacagacccccggcgtaggtcgcgcaatttgggtaaggtcatcgatacccttacgtgcggcttcgccgacctcatggggtacataccgctcgtcggcgcccctcttggaggcgctgccagggccctggcgcatggcgtccgggttctggaagaggcgtgaattacgcaacagggaaccttcctggttgctctttctctatcttccttctggccctgctctcttgtctgaccgtgcccgctacagcctaccaagtgcgcaactccacggggctttaccatgtcaccaatgattgccccaactcgagtattgtgtacgaggcggacgacaccatcctgcacactccggggtgcgtcccttgcgttcgcgagggaacgcctcgaggtgttgggtggcgatgtcccccacggtggccaccagggacggcaagctccccacaacgcagcttcgacgacacatcgatctgtttgttgggggcgccaccctctgctcggccctctacgtgggggacttgtgcgggtctgtctttcttgtcggtcaactgttcactttctctcccaggcgccactggacgacgcaggattgcaattgtctatctatcccggccatataacgggccaccgcatggcatgggatatgatgatgaactggtcccctacggcggcgttggtaacggctcagctgcttcggatcccacaagccatcgtggacatgatcgctggtgctcactggggagtcctagcgggcatagcgtatttctccatggtggggaactgggcgaaggtcctggtagtgctgctgctgtttgcggcgtcgacgcgtccacctacaccaccgggggagcagccgcttccaccacgtctaagctcacaaggctctttgacctgggccctaagcagaacatccagctgatcaacaccaacggcagttggcacatcaacagaacggccctgaactgtaatgaaagcctcaacgccggctggttagcagggctcatttactaccaaaaattcaactcttcgggctgcccgagagaatggccagctgccgacccctcaccgatttcgaccagggctggggccctatcagttacaccaatgggagtggccccgaccaccgcccttactgctggcactaccccccaaaaccttgtggtattgtgcccgcaaagagcgtgtgtggcccggtatactgcttcactcccagccctgtggtggtgggaacgaccgacaggttgggcgtgccacctacaactggggtgacaatgacacggacgtcttcgtccttaacaacaccaggccaccgctgggcaattggttcggttgcacctggatgaactcaactggattcaccaaagtgtgcggagcgcccccttgctccatcggaggggtgggcaacaacaccttgctctgccccactgactgttttcgcaagcatccggaagccacatactctcggtgcggtccggtccctggatcacacccaggtgcttagtcaactacccttataggctttggcactatccttgtaccgtcaactacaccatattcaaggtcaggatgtacgtgggaggggtcgagcacaggctggaagctgcttgcaactggacgcgaggcgagcgttgcgatctggaagacagggacaggtccgagctcagcccgctgctgctgtccaccacacatggcaggtccttccgtgttccttcacgaccctgccagccttgtccaccggcctcatccacctccaccaaaacattgtggacgtgcagtacttgtacggggtggggtcgagcattgtgtcctgggccgttaagtgggagtacgtcgttctcctattccttctgcttgcggacgcgcgcgtctgctcctgcttgtggatgatgttactcatatcccaagcgaggcagctttggagaacctcgtaatactcaatgcagcatccctggccgggacgcacggacttgtgcccttcctcgtgttcttctgctttgcatggtatttgaagggtaagtgggtgcccggagcagcttacgtcctctacggaatgtggcctctcctcctgctcctgttagcgttgccccagcgggcatacgcgctggactcagagacggccgcgtctgtggaggcgctgttcttgtcgggttgatggcgctcactctgtcaccatatttcaagcactatatcagctggtgcttgtggtggcttcagtattttctgaccagagcagaggcgcaattgcacatgtgggttccccccctcagcgttcgaggggggcgtgatgccatcatcttactcacgtgtgtcgtacacccggccttgatattcgacatcaccaactgctgcttgccgtcttcggtcccctctgggttcttcaggccagtttgcttaaggtaccctactttgtgcgcgtccaaggcctcctccggatctgtgcgctagtgcggaagatggccggaggccattacgtgcaaatggccatcatcaagttgggggcgcttactggcacctacatctacaaccatctcactcctcttcgggactgggcgcacaacggctgcgagatctggccgtggctgtagagccagtcgtcttctcccaaatggagaccaagctcatcacgtggggggcagacaccgccgcgtgcggtgacatcatcaacaacctgcccgtctccgcccgcaggggccaggagatactgctcggaccagccgatggaatggtctccaaggggtggagattgctagcacccatcacggcatacgcccagcagacaggggcctcctagggtgtataatcaccagcctgaccggccgggacaaaaaccaagtggagggtgaagtccagattgtgtcaactgctgcccaaaccttcctggcaacgtgcatcaatggggtatgctggactgtttaccacggggccggaacgaggaccatcgcatcacccaagggtcctgttatccagatgtataccaacgtagaccaggacctcgtggctggcctgcccctcaaggtgcccgctcattgacaccctgcacctgcggctcctcggacctttacctggttacgaggcacgccgatgtcattcccgtgcgccggcggggtgatagcaggggcagcctgctttcgcccaggcctatctcttacctgaaaggctcctcggggggtccgctgttgtgccccgcgggacacgctgttggcatattcagggcgcggtgtgcacccgtggagtggctaaagcggtggactttatccccgtggagaacctagagacaaccatgaggtccccggtgttcacagacaactcctctccgccagcagtgccccagagtttccaggtggcccacttgcatgctcccaccggcagcggtaagagcaccaaggtcccggctgcatacgcagcccagggctacaaggtgctagtgctcaaccctctgttgccgcaactcttggctttggtgcctatatgtccaaggcccatggggtcgaccctaacatcaggaccggggtgaggacaatcaccactggcagccccatcacgtactcaacctacggcaagttccttgccgatggcgggtgctcggggggtgcctatgacataataatctgtgacgagtgccactccacggatgccacatccatcttgggatcggcactgtccttgaccaagcagagactgcgggggcgagactggtcgtgctcgccaccgctacccctccgggctctgtcactgtgccccatcctaacatcgaggaggttgctctgtctaccaccggagagatccctttctatggcaaggctatcccccttgaggtaatcaagggggggagacatctcatcttctgccattcaaagaagaagtgcgagagctcgccgcaaagctggtcgcattgggcatcaatgccgtggcctactaccgcggtctcgacgtgtccgtcatcccgaccagcggcgatgttgtcgtcgtggcaactgatgccctcatgactggctttaccggcgacttcgactcggtgatagactgcaacacgtgtgtcacccagacagtcgacttcagccttgaccctacttttacaatcgagacaccacgcttccccaggatgctgtctcccgtactcagcgtcggggcaggactggcagggggaagcctggcgtctatagatttgtggcaccgggggagcgcccctccggcatgttcgactcgtccgtcctctgtgagtgctatgacgcgggctgcgcttggtatgagctcacgcccgccgagactacagttaggctgcgagcgtacatgaacaccccgggcttcccgtgtgccaggaccatcttgagttttgggagggcgtctttacgggccttacccatatagatgcccatttcctatcccagacaaaacagagcggggaaaactttccttacctggtagcgtaccaagccaccgtatgcgctagggctcaagcccctcccccatcgtgggaccagatgtggaagtgcctgatccgcctcaaacccactctccatggccaacacctctgctatacagactgggcgctgttcagaatgaagtcaccctgacgcacccaatcaccaagtacatcatgacatgcatgtcggccgacctggaggtc

SEQ ID NO: 720 - DNA, 5246 bp, Hepatitis C virus
tcactcccctgtgaggaactactgtcttcacgcagaaagcgtctagccatggcgttagtatgagtgtcgtgcagcctccaggaccccccctcccgggagagccatagtggtctgcggaaccggtgagacaccggaattgccaggacgaccgggtcctttcttggataaacccgctcaatgcctggagatttgggcgtgcccccgcaagaccgctagccgagtagtgttgggtcgcgaaaggccttgtggtactgcctgatagggtgcttgcgagtgccccgggaggtctcgtagaccgtgcaccatgagcacgaatcctaaacctcaaagaaaaaccaaacgtaaaccaaccgtcgcccacaggacgtcaagttcccgggtggcggtcagatcgttggtggagtttacttgttgccgcgcaggggccctagattgggtgtgcgcgcgacgaggaagacttccgagcggtcgcaacctcgaggtagacgtcagcctatccccaaggctcgtcggcccgagggcaggacctgggcgcagcccgggtacccttggcccctctatggaatgagggctgcgggtgggcgggatggctcctgtccccccgtggctctcggcctagctggggccccacagacccccggcgtaggtcgcgcaatttgggtaaggtcatcgatacccttacgtgcggcttcgccgacctcatggggtacataccgctcgtcggcgcccctcttggaggcgctgccagggccctggcgcatggcgtccgggttctggaagaggcgtgaactatgcgacagggaaccttcctggttgctctttctctattttccttctggccctgctctcttgtctgaccgtgcccgcttcagcctaccaagtgcgcaactccacggggctttaccatgtcaccaatgattgccccaactcgagtattgtgtacgaggcggacgacaccatcctgcacactccggggtgcgtcccttgcgttcgcgagggaacgcctcgaggtgttgggtggcgatgtcccccacggtggccaccagggacggcaagctccccacaacgcagcttcgacgacacatcgatctgtttgttgggggcgccaccctctgctcggccctctacgtgggggacttgtgcgggtctgtctttcttgtcggtcaactgttcactttctctcccaggcgccattggacgacgcaggattgcaattgtctatctatcccggccatataacgggccaccgcatggcatgggatatgatgatgaactggtcccctacggcggcgttggtaacggctcagctgcttcggatcccacaagccatcgtggacatgatcgctggtgctcactggggagtcctagcgggcatagcgtatttctccatggtggggaactgggcgaaggtcctggtagtgctgttgctgtttgcggcgtcgacgcgaccacctacaccactgggggagcagccgcttccaccgcgtctaagttcacaaagctctttgacctgggccctaagcagaacatccagctgatcaacaccaacggcagttggcacatcaacagaacggccctgaactgtaatgaaagcctcaacgccggctggttagcagggctcatttactaccaaaaattcaactcttcgggctgcccgagagaatggccagctgccgacccctcaccgatttcgaccagggctggggccctatcagttacaccaatgggagtggccccgaccaccgcccttactgttggcactaccccccaaaaccttgtggtattgtgcccgcaaagagcgtgtgtggcccggtatactgcttcactcccagccctgtggtggtgggaacgaccgacaggttgggcgtgccacctacaactggggtgacaatgacacggacgtcttcgtccttaacaacaccaggccaccgctgggcaattggttcggttgcacctggatgaactcaactggattcaccaaagtgtgcggagcgcccccttgctccatcggaggggtgggcaacaacaccttgctctgccccactgactgttttcgcaagcatccggaagccacatactctcggtgcggtccggtccctggatcacacccaggtgcttagtcaactacccttataggctttggcactatccttgtaccgtcaactacaccatattcaaggtcaggatgtacgtgggaggggtcgagcacaggctggaagctgcttgcaactggacgcgaggcgagcgttgcgatctagaagacagggacaggtccgagctcagcccgctgctgttgtccaccacacatggcaggtccttccgtgttccttcacgaccctgccagccttgtccaccggcctcatccacctccaccaaaacattgtggacgtgcagtacttgtacggggtggggtcgagcattgtgtcctgggccgttaagtgggagtacgtcgttctcctattccttctgcttgcggacgcgcgcgtctgctcctgcttgtggatgatgttactcatatcccaagcgaggcagctttggagaacctcgtaatactcaatgcagcatccctggccgggacgcatggacttgtgcccttcctcgtgttcttctgctttgcatggtatttgaagggtaaatgggtgcccggagcagcctacgtcctctacggaatgtggcctctcctcctgctcctgttagcgttgccccagcgggcatacgcgctggactcagaggcggccgcgtctgtggaggcgctgttcttgtcgggttgatggcgctcactctgtcaccatatttcaagcactatatcagctggtgcttgtggtggcttcagtattttctgaccagagcagaggcgcaattgcacatgtgggttccccccctcaacgttcggggggggcgtgatgccatcatcttactcacgtgtgtcgtacacccgaccttgatattcgacatcaccaactgctgcttgctgtcttcggtcccctctgggttcttcaggccagtttgcttaaggtaccctactttgtgcgcgtccaaggcctcctccggatctgtgcgctagtgcggaagatggtcggaggccattacgtgcaaatggccatcatcaagttgggggcgcttactggcacctacatctacaaccatctcactcctcttcgggactgggcgcacaacggctgcaagatctggccgtggctgtagagccagtcgtcttctcccaaatggagaccaagctcatcacgtggggggcagacaccgccgcgtgcggtgacatcatcaacaacctgcccgtctccgcccgcaggggccaggagatactgctcggaccagccgatggaatggtctccaaggggtggagattgctagcacccatcacggcatacgcccagcagacaggggcctcctagggtgtataatcaccagcctgaccggccgggacaaaaaccaagtggagggtgaagtccagattgtgtcaactgctgcccaaaccttcctggcaacgtgcatcaatggggtatgctggactgtttaccacggggccggaacgaggaccatcgcatcacccaagggtcctgttatccagatgtataccaacgtagaccaggacctcgtggctggcccgcccctcaaggtgcccgctcattgacaccctgcacctgcggctcctcggacctttacctggttacgaggcacgccgatgtcatccccgtgcgccggcggggcgatagcaggggcagtctgctttcgcccaggcctatctcttacttgaaaggctcctcggggggtccgctgttgtgccccgcgggacacgctgtcggcatattcagggcgcggtgtgcacccgtggggtggctaaagcagtggactttatccccgtggagaacctagagacaaccatgaggtccccggtgttcacagacaactcctctccgccagcagtgccccagagtttccaggtggcccacttgcatgctcccaccggcagcggtaagagcaccaaggtcccggctgcatacgcagcccagggctacaaggtgctagtgctcaaccctctgttgccgcaactcttggctttggtgcttacatgtccaaggcccatggggtcgaccctaacatcaggactggggtgaggacaatcaccactggcagccccatcacgtactcaacctacggcaagttccttgccgatggcgggtgctcggggggtgcctatgacataataatctgtgacgagtgccactccacggatgccacatccatcttgggatcggtactgtccttgaccaagcagagactgcgggggcgagactggtcgtgctcgccaccgctacccctccgggctctgtcactgtgccccatcctaacatcgaggaggttgctctgtccaccaccggagagatccctttctatggcaaggctatcccccttgaggtaatcaagggggggagacatctcatcttctgccattcaaagaagaagtgcgagagctcgccgcaaagctggtcgcattgggcatcaatgccgtggcctactaccgcggtctcgacgtgtccgtcatcccgaccagcggtgatgttgtcgtcgtggcaaccgatgccctcatgactggctttaccggcgacttcgactcggtgatagactgcaacacgtgtgtcacccagacagtcgacttcagccttgaccctacttttacaattgagacaccacgcttccccaggatgctgtctcccgtactcagcgtcggggcaggactggcagggggaagcctggcgtctatagatttgtggcaccgggggagcgcccctccggcatgttcgactcgtccgtcctctgtgagtgctatgacgcgggctgcgcttggtatgagctcacgcccgccgagactacagttaggctacgagcgtacatgaacaccccgggcttcccgtgtgccaggaccatcttgagttttgggagggcgtctttacgggccttacccatatagatgcccatttcctatcccagacaaagcagagcggggaaaactttccttacctggtagcgtaccaagccaccgtatgcgctagggctcaagcccctcccccatcgtgggaccagatgtggaagtgcctgatccgcctcaaacccactctccatggccaacacctctgctatacagactgggcgctgttcagaatgaagtcaccctgacgcacccaatcaccaagtacatcatgacatgcatgtcggccgacctggaggtc

SEQ ID NO: 721 - DNA, 5246 bp, Hepatitis C virus
tcactcccctgtgaggaactactgtcttcacgcagaaagcgtctagccatggcgttagtatgagtgtcgtgcagcctccaggaccccccctcccgggagagccatagtggtctgcggaaccggtgagacaccggaattgccaggacgaccgggtcctttcttggataaacccgctcaatgcctggagatttgggcgtgcccccgcaagaccgctagccgagtagtgttgggtcgcgaaaggccttgtggtactgcctgatagggtgcttgcgagtgccccgggaggtctcgtagaccgtgcaccatgagcacgaatcctaaacctcaaagaaaaaccaaacgtaaaccaaccgtcgcccacaggacgtcaagttcccgggtggcggtcagatcgttggtggagtttacttgttgccgcgcaggggccctcgattgggtgtgcgcgcgacgaggaagacttccgagcggtcgcaacctcgaggtagacgtcagcctatccccaaggctcgtcggcccgagggcaggacctgggcgcagcccgggtacccttggcctctctatggaatgagggctgcgggtgggcgggatggctcctgtccccccgtggctctcggcctagttggggccccacagacccccggcgtaggtcgcgcaatctgggtaaggtcatcgatacccttacgtgcggcttcgccgacctcatggggtacataccgctcgtcggcgcccctcttggaggcgctgccagagccctggcgcatggcgtccgggttctggaagaggcgtgaattatgcaacagggaaccttcctggttgctctttctctatcttccttctggccctgctctcttgtctgaccgtgcccgcttcagcctaccaagtgcgcaactccacggggctttaccatgtcaccaatgattgccccaactcgagtattgtgtacgaggcggacgacaccatcctgcacactccggggtgcgtcccttgcgttcgcgagggaacgcctcgaggtgttgggtggcgatgtcccccacggtggccaccagggacggcaaactccccacaacgcagcttcgacgacacatcgatctgtttgttgggggcgccaccctctgctcggccctctacgtgggggacttgtgcgggtctgtctttcttgtcggtcaactgttcactttctctcccaggcgccactggacgacgcaggattgcaattgtctatctatcccggccatataacgggccaccgcatggcatgggatatgatgatgaactggtcccctacggcggcgttggtaacggctcagctacttcggatcccacaagccatcgtggacatgatcgctggtgctcactggggagtcctagcgggcatagcgtatttctccatggtggggaactgggcgaaggtcctggtagtgctgttgctgtttgcggcgtcgacgcgaccacctacaccaccgggggagcagccgcttccaccgcgtctaagttcacaaagctctttgacctgggccctaagcagaacatccagctgatcaacaccaacggcagttggcacatcaacagaacggccctgaactgtaatgaaagcctcaacgccggctggttagcagggctcatttattaccaaaaattcaactcttcgggctgcccgagagaatggccagctgccgacccctcaccgatttcgaccagggctggggccctatcagttacaccaatgggagtggccccgaccaccgcccttactgctggcactaccccccaaaaccttgtggtattgtgcccgcaaagagcgtgtgtggcccggtatactgcttcactcccagccctgtggtggtgggaacgaccgacaggttgggcgtgccacctacaactggggtgacaatgacacggacgtcttcgtccttaacaacaccaggccaccgctgggcaattggttcggctgcacctggatgaactcaactggattcaccaaagtgtgcggagcgcccccttgctccatcggaggggtgggcaacaacaccttgctctgccccactgactgttttcgcaagcatccggaagccacatactctcggtgcggtccggtccctggatcacacccaggtgcttagtcaactacccttataggctttggcactatccttgtaccgtcaactacaccatattcaaggtcaggatgtacgtgggaggggtcgagcacaggctggaagctgcttgcaactggacgcgaggcgagcgttgcgatctagaagacagggacaggtccgagctcagcccgctgctgctgtccaccacacatggcaggtccttccgtgttccttcacgaccctgccagccttgtccaccggcctcatccacctccaccaaaacattgtggacgtgcagtacttgtacggggtggggtcgagcattgtgtcctgggccgttaagtgggagtacgtcgttctcctattccttctgcttgcggacgcgcgcgtctgctcctgcttgtggatgatgttactcatatcccaagcgaggcagctttggagaacctcgtaatactcaatgcagcatccttggccgggacgcacggacttgtgcccttcctcgtgttcttctgctttgcatggtacttgaagggtaagtgggtgcccggagcagcctacgtcctctacggaatgtggcctctcctcctgctcctgttagcgttgccccagcgggcatacgcgctggactcagaggcggccgcgtctgtggaggcgctgttctcgtcgggttgatggcgctcactctgtcaccatatttcaagcactatatcagctggtgcttgtggtggcttcagtattttctgaccagagcagaggcgcaattgcacatgtgggttccccccctcaacgttcgaggggggcgtgatgccatcatcttactcacgtgtgtcgtacacccgaccttgatattcgacatcaccaactgctgcttgccgtcttcggtcccctctgggttcttcaggccagtttgcttaaggtaccctactttgtgcgcgtccaaggtctcctccggatctgtgcgctagtgcggaagatggtcggaggccattacgtgcaaatggccatcatcaagttgggggcgcttactggcacctacatctacaaccatctcactcctcttcgggactgggcgcacaacggctgcgagatctggccgtggctgtagagccagtcgtcttctcccaaatggagaccaagctcatcacgtggggggcagacaccgccgcgtgcggtgacatcatcaacaacctgcccgtctccgcccgcaggggccaggagatactgctcggaccagccgatggaatggtctccaaggggtggagattgctagcacccatcacggcatacgcccagcagacaggggcctcctagggtgtataatcaccagcctgaccggccgggacaaaaaccaagtggagggtgaagtccagattgtgtcaactgctgcccaaaccttcctggcaacgtgcatcaatggggtatgctggactgtttaccacggggccggaacgaggaccatcgcatcacccaagggtcctgttatccagatgtataccaacgtagaccaggacctcgtggctggcccgcccctcaaggtgcccgctcattgacaccctgcacctgcggctcctcggacctttacctggttacgaggcacgccgatgtcattcccgtgcgccggcggggtgatagcaggggcagcctgctttcgcccaggcctatctcttacttgaaaggctcctcggggggtccgctgttgtgccccgcgggacacgctgtcggcatattcagggcgcggtgtgcacccgtggagtggctaaagcggtggactttgtccccgtggagaacctagagacaaccatgaggtccccggtgttcacagacaactcctctccgccagcagtgccccagagtttccaggtggcccacttgcatgctcccaccggcagcggtaagagcaccaaggtcccggctgcatacgcagcccagggctacaaggtgctagtgctcaaccctctgttgccgcaactcttggctttggcgcttatatgtccaaggcccatggggtcgaccctaacatcaggaccggggtgaggacaatcaccactggcagccccatcacgtactcaacctacggcaagttccttgccgatggcgggtgctcggggggtgcctatgacataataatctgtgacgagtgccactccacggatgccacatccatcttgggatcggcactgtccttgaccaagcagagactgcgggggcgagactggttgtgctcgccaccgctacccctccgggctctgtcactgtgccccatcctaacatcgaggaggttgctctgtccaccaccggagagatccctttctatggcaaggctatcccccttgaggtaatcaagggggggagacatctcatcttctgccattcaaagaagaagtgcgagagctcgccgcaaagctggtcgcattgggcatcaatgccgtggcctactaccgcggtctcgacgtgtccgtcatcccgaccagcggtgatgttgtcgtcgtggcaaccgatgccctcatgactggctttaccggcgacttcgactcggtgatagactgcaacacgtgtgtcacccagacagtcgacttcagccttgaccctacttttacaattgagacaccacgctcccccaggatgctgtctcccgtactcagcgtcggggcaggaccggcagggggaagcctggcgtctatagatttgtggcaccgggggagcgcccctccggcatgttcgactcgtccgtcctctgtgagtgctatgacgcgggctgcgcttggtatgagctcacgcccgccgagactacagttaggctacgagcgtacatgaacaccccgggcttcccgtgtgccaggaccatcttgagttttgggagggcgtctttacgggccttacccatatagatgcccatttcctatcccagacaaagcagagcggggaaaacttcccttacctggtagcgtaccaagccaccgtatgcgctagggctcaagcccctcccccatcatgggaccagatgtggaagtgcctgatccgcctcaaacccactctccatggccaacacctctgctatacagactgggcgctgttcagaatgaagtcaccctgacgcacccaatcaccaagtacatcatgacatgcatgtcggccgacctggaggtc

SEQ ID NO: 722 - DNA, 5246 bp, Hepatitis C virus
tcactcccctgtgaggaactactgtcttcacgcagaaagcgtctagccatggcgttagtatgagtgtcgtgcagcctccaggaccccccctcccgggagagccatagtggtctgcggaaccggtgagacaccggaattgccaggacgaccgggtcctttcttggataaacccgctcaatgcctggagatttgggcgtgcccccgcaagaccgctagccgagtagtgttgggtcgcgaaaggccttgtggtactgcctgatagggtgcttgcgagtgccccgggaggtctcgtagaccgtgcaccatgagcacgaatcctaaacctcaaagaaaaaccaaacgtaaaccaaccgtcgcccacaggacgtcaagttcccgggtggcggtcagatcgttggtggagtttacttgttgccgcgcaggggccctagattgggtgtgcgcgcgacgaggaagacttccgagcggtcgcaacctcgaggtagacgtcagcctatccccaaggctcgtcggcccgagggcaggacctgggcgcagcccgggtacccttggcctctctatggaatgagggctgcgggtgggcgggatggctcctgtccccccgtggctctcggcctagctggggccccacagacccccggcgtaggtcgcgcaatttgggtaaggtcatcgatacccttacgtgcggcttcgccgacctcatggggtacataccgctcgtcggcgcccctcttggaggcgctgccagggccctggcgcatggcgtccgggttctggaagaggcgtgaattatgcaacagggaaccttcctggttgctctttctctatcttccttctggccctgctctcttgtctgaccgtgcccgcttcagcctaccaagtgcgcaactccacggggctttaccatgtcaccaatgattgccccaactcgagtattgtgtacgaggcggacgacaccatcctgcacactccggggtgcgtcccttgcgttcgcgagggaacgcctcgaggtgttgggtggcggtgtcccccacggtggccaccagggacggcaagctccccacaacgcagcttcgacgacacatcgatctgtttgttgggggcgccaccctctgctcggccctctacgtgggggacttgtgcgggtctgtctttcttgtcggtcaactgttcactttctctcccaggcgccactggacgacgcaggattgcaattgtctatctatcccggccatataacgggccaccgcatggcatgggatatgatgatgaactggtcccctacggcggcgttggtaacggctcagctgcttcggatcccacaagccatcgtggacatgatcgctggtgctcactggggagtcctagcgggcatagcgtatttctccatggtggggaactgggcgaaggtcctggtagtgctgctgttgtttgcggcgtcgacgcgaccacctacaccaccgggggagcagccgcttccaccgcgtctaagttcacaaagctctttgacctgggccctaagcagaacatccagctgatcaacaccaacggcagttggcacatcaacagaacggccctgaactgtaatgaaagcctcaacgccggctggttagcagggctcatttactaccaaaaattcaactcttcgggctgcccgagagaatggccagctgccgacccctcaccgatttcgaccagggctggggccctatcagttacaccaatgggagtggccccgaccaccgcccttactgctggcattaccccccaaaaccttgtggtattgtgcccgcaaagagcgtgtgtggcccggtatactgcttcactcccagccctgtggtggtgggaacgaccgacaggttgggcgtgccacctacaactggggtgacaatgacacggacgtcttcgtccttaacaacaccaggccaccgctgggcaattggttcggttgcacctggatgaactcaactggattcaccaaagtgtgcggagcgcctccttgctccatcggaggggtgggcaacaacaccttgctctgccccactgactgctttcgcaagcatccggaagccacatactctcggtgcggtccggtccctggatcacacccaggtgcttagtcaactacccttataggctttggcactatccttgtaccgtcaactacaccatattcaaggtcaggatgtacgtgggaggggtcgagcacaggctggaagctgcttgcaactggacgcgaggcgagcgttgcgacctagaagacagggacaggtccgagctcagcccgctgctgctgtccaccacacatggcaggtccttccgtgttccttcacgaccctgccagccttgtccaccggcctcatccacctccaccaaaacattgtggacgtgcagtacttgtacggggtggggtcgagcattgtgtcctgggccgttaagtgggagtacgtcgttctcctattccttctgcttgcggacgcgcgcgtctgctcctgcttgtggatgatgctactcatatcccaagcgaggcagctttggagaacctcgtaatactcaatgcagcatccctggccgggacgcacggacttgtgcccttcctcgtgttcttctgctttgcatggtatttgaagggtaagtgggtgcccggagcagcctacgtcctctacggaatgtggcctctcctcctgctcctgttagcgttgccccagcgggcatacgcactggactcagagacggccgcgtctgtggaggcgctgttcttgtcgggttgatggcgctcactctgtcaccatatttcaagcactatatcagctggtgcttgtggtggcttcagtattttctgaccagagcagaggcgcaattgcacatgtgggttccccccctcaacgttcgaggggggcgtgatgccatcatcttactcatgtgtgtcgtacacccgaccttgatattcgacatcaccaactgctgcttgccgtcttcggtcccctctgggttcttcaggccagtttgcttaaggtaccctactttgtgcgcgtccaaggcctcctccggatctgtgcgttagtgcggaagatggtcggaggtcattacgtgcaaatggccatcatcaagttgggggcgcttactggcacctacatctacaaccatctcactcctcttcgggactgggcgcacaacggctgcgagatctggccgtggccgtagagccagtcgtcttctcccaaatggagaccaagctcatcacgtggggggcagacaccgccgcgtgcggtgacatcatcaacaacctgcccgtctccgcccgcaggggccaggagatactgctcggaccagccgatgggatggtctccaaggggtggagattgctagcacccatcacggcatacgcccagcagacaggggcctcctagggtgtataatcaccagcctgaccggccgggacaaaaaccaagtggagggtgaagtccagattgtgtcaactgctgcccaaaccttcctggcaacgtgcatcaatggggtatgctggactgtttaccacggggccggaacgaggaccattgcatcacccaagggtcctgttatccagatgtataccaacgtagaccaggacctcgtggctggcccgcccctcaaggtgcccgctcattgacaccctgcacctgcggctcctcggacctttacctggttacgaggcacgccgatgtcattcccgtgcgccggcggggtgatagcaggggcagcctgctttcgcccaggcctatctcttacttgaaaggctcctcggggggtccgctgttgtgccccgcgggacacgctgtcggcatattcagggcgcggtgtgcacccgtggagtggctaaagcggtggactttatccccgtggagaacctagagacaaccatgaggtccccggtgttcacagacaactcctctccgccagcagtaccccagagtttccaggtggcccacttgcatgctcccaccggcagcggtaagagcaccaaggtcccggctgcatacgcagcccagggctacaaggtgctagtgctcaaccctctgttgccgcaactcttggctttggtgcttatatgtccaaggcccatggggtcgaccctaacatcaggaccggggtgaggacaatcaccactggcagccccatcacgtactcgacctacggcaagttccttgccgatggtgggtgctcggggggtgcctatgacataataatctgtgacgagtgccactccacggatgccacatccatcttgggatcggcactgtccttgaccaagcagagactgcgggggcgagactggtcgtgctcgccaccgctacccctccgggctctgtcactgtgccccatcctaacatcgaggaggttgctctgtccaccaccggagagatccctttctatggcaaggctatcccccttgaggtaatcaagggggggagacatctcatcttctgtcattcaaagaagaagtgcgagagctcgccgcaaagctggtcgcattgggcatcaatgccgtggcctactaccgcggtctcgacgtgtccgtcatcccgaccagcggtgatgttgtcgtcgtggcaaccgatgccctcatgactggctttaccggcgacttcgactcggtgatagactgcaacacgtgtgtcacccagacagtcgacttcagccttgaccctacttttacaattgagacaccacgcttccccaggatgctgtctcccgtactcagcgtcggggcaggaccggcagggggaagcctggcatctatagatttgtggcaccgggggagcgcccctccggcatgttcgactcgtccgtcctctgtgagtgctatgacgcgggctgcgcttggtatgagctcacgcccgccgagactacagttaggctacgagcgtacatgaacaccccgggcttcccgtgtgccaggaccatcttgagttttgggagggcgtctttacgggccttacccatatagatgcccatttcctatcccagacaaagcagagcggggaaaactttccttacctggtagcgtaccaagccaccgtatgcgctagggctcaagcccctcccccatcgtgggaccagatgtggaagtgcctgatccgcctcaaacccactctccatggccaacacctctgctatacagactgggcgctgttcagaatgaagtcaccctgacgcacccaatcaccaagtacatcatgacatgcatgtcggccgacctggaggtc

SEQ ID NO: 723 - DNA, 5246 bp, Hepatitis C virus
tcactcccctgtgaggaactactgtcttcacgcagaaagcgtctagccatggcgttagtatgagtgtcgtgcagcctccaggaccccccctcccgggagagccatagtggtctgcggaaccggtgagacaccggaattgccaggacgaccgggtcctttcttggataaacccgctcaatgcctggagatttgggcgtgcccccgcaagaccgctagccgagtagtgttgggtcgcgaaaggccttgtggtactgcctgatagggtgcttgcgagtgccccgggaggtctcgtagaccgtgcaccatgagcacgaatcctaaacctcaaagaaaaaccaaacgtaaaccaaccgtcgcccacaggacgtcaagttcccgggtggcggtcagatcgttggtggagtttacttgttgccgcgcaggggccctagattgggtgtgcgcgcgacgaggaagacttccgagcggtcgcaacctcgaggtagacgtcagcctatccccaaggctcgtcggcccgagggcaggacctgggcgcagcccgggtacccttggcctctctatggaatgagggctgcgggtgggcgggatggctcctgtccccccgtggctctcggcctagctggggccccacagacccccggcgtaggtcgcgcaatttgggtaaggtcatcgatacccttacgtgcggcttcgccgacctcatggggtacataccgctcgtcggcgcccctcttggaggcgctgccagggccctggcgcatggcgtccgggttctggaagaggcgtgaattatgcaacagggaaccttcctggttgctctttctctatcttccttctggccctgctctcttgtctgaccgtgcccgcttcagcctaccaagtgcgcaactccacggggctttaccatgtcaccaatgattgccccaactcgagtattgtgtacgaggcggacgacaccatcctgcacactccggggtgcgtcccttgcgttcgcgagggaacgcctcgcggtgttgggtggcgatgtcccccacggtggccaccagggacggcaagctccccacaacgcagcttcgacgacacatcgatctgtttgttgggggcgccactctctgctcggccctctacgtgggggacttgtgcgggtctgtctttcttgtcggtcaactgttcactttctctcccaggcgccactggacgacgcaggactgcaattgtctatctatcccggccatataacgggccaccgcatggcatgggatatgatgatgaactggtcccctacggcggcgttggtaacggctcagctgcttcggatcccacaagccatcgtggacatgatcgctggtgctcactggggagtcctagcgggcatagcgtatttctccatggtggggaactgggcgaaggtcctggtagtgctgctgctgtttgcggcgtcgacgcgaccacctacaccaccgggggagcagccgcttccaccgcgtctagggtcgcaagtttctttgacctgggccctcagcagaacatccagctgatcaacaccaacggcagttggcacatcaacagaacggccctgaactgtaatgaaagcctcaacgccggctggttagcagggctcatctacttcagaaaattcaactcttcaggctgcctgagaggatggccagctgccgacccctcaccgacttcgaccagggctggggccctatcagttacaccaatgggagtggccccgaccaccgcccttactgctggcactaccccccaaaaccttgtggtattgtgcccgcaaagagcgtgtgtggcccggtatactgcttcactcccagccctgtggtggtgggaactaccgacaggttgggcgtgccacctacaactggggtgacaatgacacggacgtcttcgtccttaacaacaccaggccaccgctgggcaattggttcggttgcacctggatgaactcaactggattcaccaaagtgtgcggagcgcccccttgctccatcggaggggtgggcaacaacaccttgctctgccccactgattgttttcgcaagcatccggaagccacatactctcggtgcggtccggtccctggatcacacccaggtgcttagtcaactacccttacaggctttggcactatccttgtaccgtcaactataccatattcaaggtcaggatgtacgtgggaggggtcgagcacaggctggaagctgcttgcaactggacgcgaggcgagcgttgcgatctagaagacagggacaggtccgagctcagcccgctgctgctgtccaccacacatggcaggtccttccgtgttccttcacgaccctgccagccttgtccaccggcctcatccacctccaccaaaacattgtggacgtgcagtacttgtacggggtggggtcgagcattgtgtcctgggccgttaagtgggagtacgtcgttctcctattcctcctgcttgcggacgcgcgcgtctgctcctgcttgtggatgatgttactcatatcccaagcgaggcagccttggagaacctcgtgatactcaatgcagcatccctggccgggacgcatggacttgtgcccttccttgtgttcttctgctttgcatggtatttgaagggtaagtgggtgcccggagcggcctacgtcctctacggaatgtggcctctcctcctgctcctgttagcgttgccccagcgggcatacgcgctggactcagaggcggccgcgtctgtggaggcgctgttcttgtcgggttgatggcgctcactctgtcaccatatttcaagcactatatcagctggtgcttgtggtggcttcagtattttctgaccagagcagaggcgcaattgcacatgtgggttccccccctcaacgttcgaggggggcgtgatgccatcatcttactcacgtgtgtcgtacacccggctttgatattcgacatcaccaactgctgcttgccgtcttcggtcccctctgggttcttcaggccagtttgcttaaagtaccctactttgtgcgcgttcaaggcctcctccggatctgtgcgctagtgcggaagatggccggaggccattacgtgcaaatggccatcatcaagttgggggcgcttactggcacctacatctacaaccatctcactcctcttcgggactgggcgcacaacggctgcgagatctggccgtggctgtagagccagtcgtcttctcccaaatggagaccaagctcatcacgtggggggcagacaccgccgcgtgcggtgacatcatcaacaacctgcccgtctccgcccgcaggggccaggagatactgctcggaccagccgatggaatggtctccaaggggtggagattgctagcgcccatcacggcgtacgcccagcagacaggggcctcctagggtgtataatcaccagcctgaccggccgggacaaaaaccaagtggagggtgaagtccagattgtgtcaactgctgcccaaactttcctggcaacgtgcatcaatggggtatgctggactgtttaccacggggccggaacgaggaccatcgcatcacccaagggtcctgtcatccagatgtataccaacgtagaccaggacctcgtggctggcccgcccctcaaggtgcccgctcattgacaccctgcacctgcggctcctcggacctttacctggttacgaggcacgccgatgtcattcccgtgcgccggcggggtgatagcaggggcagcctgctttcgcccaggcccatctcttacttgaagggctcctcggggggtccgctgttgtgccccgcgggacacgctgtcggcatattcagggcgcggtgtgcacccgtggagtggctaaagcggtggactttatccccgtggagaacttagagacaaccatgaggtccccggtgttcacggacaactcctccccgccagcagtgccccagagtttccaggtggcccacttgcatgctcccaccggcagcggtaagagcaccaaggtcccggctgcatacgcagcccagggctacaaggtgctagtgctcaaccctctgttgccgcaactcttggctttggtgcttatatgtccaaggcccatggggtcgaccctaacatcagaaccggggtgaggacaatcactactggcagccccatcacgtactcaacctacggcaagttccttgccgatggcgggtgctcggggggtgcctatgacataataatctgtgacgagtgccactccacggatgccacatccatcttgggatcggcactgtccttgaccaagcagagactgcgggggcgagactggtcgtgctcgccaccgctacccctccgggctctgtcactgtgccccatcctaacatcgaggaggttgctctgtccaccaccggagagatccctttctatggcaaggccatcccccttgaggtaatcaagggggggagacatctcatcttctgccattcaaagaagaagtgcgagagctcgccgcaaagctggtcgcattgggcatcaatgccgtggcctactaccgcggtctcgacgtgtccgtcatcccgaccagcggtgatgttgtcgtcgtggcaaccgacgccctcatgactggctttaccggcgacttcgactcggtgatagactgcaacacgtgtgtcacccagacagtcgacttcagccttgaccctacttttacaattgagacaccacgcttccccaggatgctgtctcccgcactcagcgtcggggcaggactggcagggggaagcctggcgtctatagatttgtggcaccgggggaacgcccctccggcatgttcgactcgtccgtcctctgtgagtgctatgacgcgggctgcgcttggtatgagctcacgcccgccgagactacagttaggctgcgagcgtacatgaacaccccgggcttcccgtgtgccaggaccatcttgagttttgggagggcgtctttacgggccttacccatatagatgcccatttcctatcccagacaaagcagagcggggaaaactttccttacctggtagcgtaccaagccaccgtatgcgctagggctcaagcccctcccccatcgtgggaccagatgtggaagtgcctgatccgcctcaaacccactctccatggccaacacctctgctatacagactgggcgctgttcagaatgaagtcaccctgacgcacccaatcaccaagtacatcatgacatgcatgtcggccgacctggaggtc

SEQ ID NO: 724 - DNA, 4865 bp, Hepatitis C virus
ggcggtcagatcgttggtggagtttacttgttgccgcgcaggggccctagattgggtgtgcgcgcgacgaggaagacttccgagcggtcgcaacctcgaggtagacgtcagcctatccccaaggctctcggcccgagggcaggacctgggcgcagcccggataccctaggcctctctatggcaatgagggctgcgggtgggcgggatggctcctgtccccccgtggctctcggcctagctggggccccacagacccccggcgtaggtcgcgcaatttgggtaaggtcatcgatacccttacatgcggcttcgccgacctcatggggtacataccgctcgtcggcgccctcttggaggcgctgccagggccctggcgcatggcgtccgggttctggaagacggcgtgaattatgcaacagggaaccttcctggttgctctttctctatcttccttctggccctgctctcttgtctgaccgtgcccgcttcagcctaccaagtgcgcaactccacggggctttaccatgtcaccaatgattgccccaactcgagtattgtgtacgggcggatgacaccatcctgcacactccggggtgcgtcccttgcgttcgcgagggtaacgcctcgcggtgttgggtggcgatgtcccccacggtggccaccagggacggcaagctccccacaacgcagcttcgacgacacatcgatctgtttgttgggggcgccaccctctgctcggccctctacgtgggggacttgtgcgggtctgtctttcttgtcgtcaactgttcactttctctcccaggcgccactggacgacgcaggactgcaattgttccatctatcccggccatataacgggccaccgcatggcatgggatatgatgatgaactggtcccctacggcggcgttggtaacggctcagctgcttcggatcccacaagccatcgtggacatgatcgctggtgcccactggggagtcctagcgggcatagcgttttctccatggtggggaactgggcgaaggtcctggtagtgctgctgctgtttgctggcgtcgacgcgaccacctacaccaccgggggagcagccgcttccaccgcgtctagggtcgcaagtttctttgacctgggccctcagcagaacatccagctgatcaacaccaacggcagttggcacatcaacagaacggccctgaactgtaatgaaagcctcacgccggctggttagcagggctcatctacttcagaaaattcaactcttcaggctgtcctgagaggatggccagctgccgacccctcaccgacttcgaccagggctggggccctatcagttacaccaatgggagcggccccgaccaccgcccttactgctggcactaccccccaaaaccttgtggtattgtgcccgcaaagagcgtgtgtggcccggtatctgcttcactcccagccctgtggtggtgggaacgaccgacaggttgggcgtgcctacctacaactggggtgacaatgacacggacgtcttcgtccttaacaacaccaggccaccgctgggcaattggttcggttgcacctggatgaactcaactggattcaccaaagtgtgcggagcgcccccttgctccatcggaggagtgggcaacaacaccttgcctgccccaccgattgttttcgcaagcatccggaagccacatactctcggtgcggctccggtccctggatcacacccaggtgcttagtcaactacccttacaggctttggcactatccttgtaccgtcaactacaccatattcaaggtcaggatgtacgtgggaggggtcgagcacaggctggaagctgcttgcaactggacgcgaggcgagcgttgcgtctagaagacagggacaggtccgagctcagcccgctgctgctgtccaccacacagtggcaggtccttccgtgttccttcacgaccctgccagccttgtccaccggcctcatccacctccaccaaaacattgtggacgtgcagtacttgtacggggtggggtcgagcattgtgtcctgggccgttaagtgggagtacgtcgttctcctattccttctgctgcggacgcgcgcgtctgctcctgcttgtggatgatgttactcatatcccaagcggaggcagctttggagaacctcgtaatactcaatgcagcatccctggccgggacgcatggacttgtgcccttccttgtgttcttctgctttgcatggtatttgaagggtaagtgggtgcccggagcggcctacgtcctctacggcatgtggcctctcctcctgccctgttagcgttgccccagcgggcatacgcgctggactcagaggcggccgcgtcgtgtggaggcgctgttcttgtcgggttgatggcgctcactctgtcaccatatttcaagcactatatcagctggtgcttgtggtggcttcagtattttctgaccagagcagaggcgcaattgcacatgtgggttccccccctcaacgttcgaggggggcgtgatgcatcatcttactcacgtgtgtcgtacacccggccttgatattcgacatcaccaaactgctgcttgccgtcttcggtcccctctgggttcttcaggccagtttgcttaaggtaccctactttgtgcgcgttcaaggcctcctccggatctgtgcgctagtgcggaagatggccggaggccattacgtgcaaatggccatcatcaagttgggggcgcttatggcacctacatctacaaccatctcactcctcttcgggactgggcgcacaacggcctgcgagatctggccgtggctgtagagccagtcgtcttctcccaaatggagaccaagctcatcacgtggggggcagacaccgccgcgtgcggtgacatcatcaacaacctgcccgtctccgcccgcaggggccaggagatactgctcggaccagccgatgcaaggtctccaaggggtggagattgctagcgcccatcacggcgtacgcccagcagacaaggggcctcctagggtgtataatcaccagcctgaccggccgggacaaaaaccaagtggagggtgaagtccagattgtgtcaactgctgcccaaaccttcctggcaacgtgcatcaatggggtatgctggactgtctaccacggggccggaacgaggaccatcgatcacccaagggtcctgttatccagatgtataccaacgtagaccaggacctcgtgggctggcccgcccctcaaggtgcccgctcattgacaccctgcacctgcggctcctcggacctttacctggttacgaggcacgccgatgtcattcccgtgcgccggcggggtgatagcaggggcagcctgctttcgcccaggcctatctcttacttgaagggctctcggggggtccgctgttgtgccccgcgggacacgctgtcggcatattcagggccgcggtgtgcacccgtggagtggctaaagcggtggactttatccccgtggagaacctagagacaaccatgaggtccccggtgttcacggataactcctctccgccagcagtgccccagagtttccaggtggcccacttgcatgctcccaccggcagcggtaagacaccaaggtcccggctgcatacgcagcccagggctacaaggtgctagtgctcaacccctctgttgccgcaactcttggctttggagcttatatgtccaaggcccatggggtcgaccctaacatcaggaccggggtgaggacaatcactactggcagccccatcacgtactcaacctacggcaagttccttgccgatggcgggtgctcggggggtgccttgacataataatctgtgacgagtgccactccacggatgccacatccatcttgggcatcggcactgtccttgaccaagcagagactgcgggggcgagactggtcgtgctcgccaccgctacccctccgggctccgtcactgtgccccatcctaacatcgaggaggttgctctgtccaccaccggagagatccctttctatggcaaggctatcccccttgggtaatcaagggggggagacatctcatcttctgccattcaaagaagaagtgcgacgagctcgccgcaaagctggtcgcattgggcatcaatgccgtggcctactaccgcggtctcgacgtgtccgtcatcccgaccagcggtgatgttgtcgtcgtggcaaccgacgccctcatgactggctttaccggcgacttcgactcggtgatagactgcaacagtgtgtcacccagacagtcgacttcagccttgaccctacttttacaattgagacaaccacgcttccccaggatgctgtctcccgcactcagcgtcgaggcaggactggcagggggaagcctggcgtctatagatttgtggcaccgggggaacgcccctccggcatgttcgactcgtccgtcctctgtgagtgctatgacgcgggctgcgcttggtatggctcacgcccgccgagactacagttaggctacgagcgtacatgaacaccccggggcttcccgtgtgccaggaccatcttgagttttgggagggcgtctttacgggccttacccatatagacgcccatttcctatcccagacaaagcagagcggggaaaactttccttacctggtagcgtaccaagccaccgtgtgcgctagggctcaagcccctccccgtcgtgggaccagatgtggaagtgcctgatccgcctcaaacccactctccatggaccaacacctctgctatacagactgggcgctgttcagaatgaagtcaccctgacgcacccaatcacaaagtacatcatgacatgcatgtcggccgacctggaggtc

SEQ ID NO: 725 - DNA, 4865 bp, Hepatitis C virus
ggcggtcagatcgttggtggagtttacttgttgccgcgcaggggccctagattgggtgtgcgcgcgacgaggaagacttccgagcggtcgcaacctcgaggtagacgtcagcctatccccaaggctctcggcccgagggcaggacctgggcgcagcccgggtacccttggcccctctatggcaatgagggctgcgggtgggcgggatggctcctgtccccccgtggctctcggcctagctggggccccacagacccccggcgtaggtcgcgcaatttgggtaaggtcatcgatacccttacgtgcggcttcgccgacctcatggggtacataccgctcgtcggcgccctcttggaggcgctgccagggccctggcgcatggcgtccgggttctggaagacggcgtgaattatgcaacagggaaccttcctggttgctctttctctatcttcctcctggccctgctctcttgtctgaccgtgcccgcttcagcctaccaagtgcgcaactccacggggctctaccatgtcaccaatgattgccccaactcgagtattgtgtacgggcggacgacaccatcctacacgctccggggtgcgtcccttgcgttcgcgagggtaacgcctcgaggtgttgggtggcgatgtcccccacggtggccaccagggacggcaagctccccacaacgcagcttcgacgacacatcgatctgtttgttgggggcgccaccctctgctcggccctctacgtgggggacttgtgcgggtctgtctttcttgtcgtcaactgttcactttctctcccaggcgccattggacgacgcaggactgcaactgttctatctatcccggccatataacgggccaccgcatggcatgggatatgatgatgaactggtcccctacggcggcgttggtaacggctcagctgcttcggctcccacaagccatcttggacatgatcgctggtgctcactggggagtcctagcgggcatagcgttttttccatggtggggaactgggcgaaggtcctagtagtgctgttgctgtttgctggcgtcgacgcggacacctacaccaccgggggaacaatggcttccgccgcgtatggggttgcaagtctcttcaacgtaggccctaagcagaacatccagctgatcaacaccaacggcagttggcacatcaacagaacggccctgaactgtaatgaaagcctcacgccggctggttagcagggctcctctacttccaaaaattcaactcttcaggctgtcccgagaggatggccagctgccgacccatcaccgatttcgtccagggctggggccctatcagttacaccaatgggagtggccccgaccaccgcccttactgctggcactaccccccaaaaccttgtggtattgtgcctgcaaagagcgtgtgtggcccggtatctgcttcactcccagtcctgtggtggtgggaacgaccgacagactgggcgtgcctacctacacctggggtgaaaatgacacggacgtcttcgtccttaacaacaccaggccaccgctgggcaattggttcggttgcacctggatgaactcaactggattcaccaaagtgtgcggagcgcccccttgctccatcggaggggtgggcaacaacaccttgcctgccccactgattgctttcgcaaacatccggaagccacatactctcggtgcggctccggtccctggatcacacccaggtgcttggtcaactacccttataggctttggcactatccttgcaccgtcaactacaccatattcaaggtcaggatgtacgtggggggggtcgagcacaggctggaagctgcctgcaactggacgcgaggcgagcgttgcgtctagaagacagggacaggtccgagctcagcccgctgctgctgtccaccactcagtggcaggtccttccgtgttccttcacgaccctgccagccttgtccaccggcctcatccacctccaccaaaacattgtggacgtgcagtacttgtacggggtggggtcgagcattgtgtcctgggccgttaagtgggagtacgtcgttctcctcttccttctgctgcagacgcgcgcgtctgctcctgcttgtggatgatgttactcatatcccaagcagaggcagctttggagaacctcgtaatactcaatgcagcatccctggccgggacgcacggacttgtgcccttcctcgtgttcttctgctttgcatggtatttgaagggtaagtgggtgcccggagcggcctacgtcctctacggaatgtggcctctcctcctgccctgttagcgttgccccagcgggcatacgcactggactcagaggcggccgcgtcgtgtggcggtgctgttcttgtcgggttgatggcgctcactctgtcaccatatttcaagcactatatcagctggtgcttgtggtggcttcagtattttctgaccagagcagaggcgcaattgcacatgtgggttccccccctcaacgttcgaggggggcgtgatgcatcatcttactcacgtgcgtagtacacccgaccttgatattcgacatcaccaaactgctgcttgccatcttcggtcccctctgggttcttcaggccagtttgcttaaggtaccctactttgtgcgcgttcaaggcctcctccggatctgcgcgttagtgcggaagatggccggaggccattacgtgcaaatggccatcatcaagttgggggcgcttatggcacctacatctacaaccatctcactcctcttcgggactgggcgcacaacggcctgcgagatctggccgtggctgtagagccagtcgtcttctcccaaatggagaccaagctcatcacgtggggggcagacaccgccgcgtgcggtgacatcatcaacaacctgcccgtctccgcccgcaggggccaggagatactgctcggaccagccgatggaaggtttccaaggggtggagattgctggcacccatcacggcgtacgcccagcagacaaggggcctcctagggtgtataatcaccagcttgaccggccgggacaagaaccaagtggagggtgaagtccagattgtgtcaactgctgcccaaaccttcctggcaacgtgcatcaatggggtatgctggactgtttaccacggggccggaacgaggaccatcgatcacccaagggtcctgttatccagatgtataccaacgtagaccaggacctcgtgggctggcccgcccctcaaggtgcccgctcattgacaccctgcacctgcggctcctcggacctttacctggttacgaggcacgccgatgtcatccccgtgcgccggcggggtgatagcaggggcagcctgctttcgcccaggcctatctcttatctgaaaggctctcggggggtccgctgttgtgccccgcgggacacgctgtcggcatcttcagggccgcggtgtgcacccgtggagtggctaaagcggtggactttatccccgtggagaacctggagacaaccatgaggtccccggtgttcacggacaactcctctccgccagcagtgccccagagtttccaggtggcccacttgcatgctcccaccggcagcggtaagacaccaaggtcccggctgcatacgcagcccagggctacaaggtgctagtgctcaacccctctgttgccgcaactcttggctttggtgcttatatgtccaaggcccatggggtcgaccctaacatcaggaccggggtgaggacaattaccactggcagccccatcacgtactcaacctacggcaagttccttgccgatggcgggtgctcggggggtgccttgacataataatctgtgacgagtgccactccacggatgccacatccatcttgggcatcggcaccgtccttgaccaagcagagactgcgggagcgagactggtcgtgctcgccaccgctacccctccgggttctgtcactgtgccccatcctaacatcgaggaggttgctctgtccaccaccggagagatccctttttatggcaaggctatcccccttgggtaatcaagggggggagacatctcatcttctgccattcaaagaagaagtgcgacgagctcgccgcaaagctggtcgcattgggcatcaatgccgtggcctactaccgcggtctcgacgtgtccgtcattccgactagcggtgatgttgtcgtcgtggcaaccgatgccctcatgactggctataccggcgacttcgactcggtgatagactgcaacagtgtgtcacccagacagtcgacttcagccttgaccctacttttacaattgagacaaccacgcttccccaggatgctgtctcccgcactcagcgtcggggcaggactggcagggggaagcctggcgtctatagatttgtggcaccgggggaacgcccctccggcatgttcgactcgtccgtcctctgtgagtgctatgacgcgggctgcgcttggtatggctcacgcccgccgagactacagttaggctacgagcgtacatgaacaccccggggcttcccgtgtgccaggaccatcttgagttttgggagggcgtctttacgggcctcacccatatagatgcccatttcctatcccagacaaagcagagcggggaaaactttccttacctggtagcgtaccaagccaccgtgtgcgctagggctcaagcccctccccatcgtgggaccagatgtggaagtgcctgatccgcctcaaacccactctacatggaccaacacctctgctatacagactgggcgctgtccagaatgaagtcaccctgacgcacccaatcaccaagtacattatgacatgcatgtcggccgacctggaggtc

SEQ ID NO: 726 - DNA, 4865 bp, Hepatitis C virus
ggcggtcagatcgttggtggagtttacttgttgccgcgcaggggccctagattgggtgtgcgcgcgacgaggaagacttccgagcggtcgcaacctcgaggtagacgtcagcctatccccaaggctctcggcccgagggcaggacctgggcgcagcccgggtaccctaggcctctctatggcaatgagggctgcgggtgggcgggatggctcctgtccccccgtggctctcggcctagctggggccccacagacccccggcgtaggtcgcgcaatttgggtaaggtcatcgatacccttacgtgcggcttcgccgacctcatggggtacataccgctcgtcggcgccctcttggaggcgctgccagggccctggcgcatggcgtccgggttctggaagacggcgtgaattatgcaacagggaaccttcctggttgctccttctctatcttccttctggccctgctctcttgtctgaccgtgcccgcttcagcctaccaagtgcgcaactccacggggctttaccatgtcaccaatgattgccccaactcgagtattgtgtacgggcggacgacaccatcctgcacactccggggtgcgttccttgcgttcgcgagggtaacgcctcgcggtgttgggtggcgatgtcccccacggtggccaccagggacggcaagctccccacaacgcagcttcgacgacacatcgatctgtttgttgggggcgccaccctctgctcggccctctacgtgggggacttgtgcgggtctgtctttcttgtcgtcaactgttcactttctctcccaggcgccactggacgacgcaggactgcaattgttctatctatcccggccatataacgggccaccgcatggcatgggatatgatgatgaactggtcccctacggcggcgttggtaacggctcagctgcttcggatcccacaagccatcgtggacatgatcgctggtgctcactggggagtcctagcgggcatagcgttttctccatggtggggaactgggcgaaggtcctggtagtgctgctgctgtttgctggcgtcgacgcgaccacctacaccaccgggggagcagccgcttccaccgcgtctagggtcgcaagtttctttgacctgggccctcagcagaacatccagctgatcaacaccaacggcagttggcacatcaacagaacggccctgaactgtaatgaaagcctcacgccggctggttagcagggctcatctacttcagaaaattcaactcttcaggctgtcctgagaggatggccagctgccgacccctcaccgacttcgaccagggctggggccctatcagttacaccaatgggagcggccccgaccaccgcccttactgctggcactaccccccaaaaccttgtggtattgtgcccgcaaagagcgtgtgtggcccggtatctgcttcactcccagccctgtggtggtgggaacgaccgacaggttgggcgtgcctacctacaactggggtgacaatgacacggacgtcttcgtccttaacaacaccaggccaccgctgggcaattggttcggttgcacctggatgaactcaactggattcaccaaagtgtgcggagcgcccccttgctccatcggaggggtgggcaacaacaccttgcctgccccactgattgttttcgcaagcatccggaagccacatactctcggtgcggctccggtccctggatcacacccaggtgcttagtcaactacccttacaggctttggcactatccttgtaccgtcaactacaccatattcaaggtcaggatgtacgtgggaggggtcgagcacaggctggaagctgcttgcaactggacgcgaggcgagcgttgcgtctagaagacagggacaggtccgagctcagcccgctgctgctgtccaccacacagtggcaggtccttccgtgttccttcacgaccctgccagccttgtccaccggcctcatccacctccaccaaaacattgtggacgtgcagtacttgtacggggtggggtcgagcattgtgtcctgggccgttaagtgggagtacgtcgttctcctattccttctgctgcggacgcgcgcgtctgctcctgcttgtggatgatgttactcatatcccaagcggaggcagctttggagaacctcgtgatactcaatgcagcatccctggccgggacgcatggacttgtgcccttccttgtgttcttctgctttgcatggtatttgaagggtaagtgggtgcccggagcggcctacgtcctctacggcatgtggcctctcctcctgccctgttagcgttgccccagcgggcatacgcgctggactcagaggcggccgcgtcgtgtggaggcgctgttcttgtcgggttgatggcgctcactctgtcaccatatttcaagcactatatcagctggtgcttgtggtggcttcagtattttctgaccagagcagaggcgcaattgcacatgtgggttccccccctcaacgttcgaggggggcgtgatgcatcatcttactcacgtgtgtcgtacacccggccttgatattcgacatcaccaaactgctgcttgccgtcttcggtcccctctgggttcttcaggccagtttgcttaaagtaccctactttgtgcgcgttcaaggcctcctccggatctgtgcgctagtgcggaagatggccggaggccattacgtgcaaatggccatcatcaagttgggggcgcttatggcacctacatctacaaccatctcactcctcttcgggactgggcgcacaacggcctgcgagatctggccgtggctgtagagccagtcgtcttctcccaaatggagaccaagctcatcacgtggggggcagacaccgccgcgtgcggtgacatcatcaacaacctgcccgtctccgcccgcaggggccaggagatactgctcggaccagccgatgcaaggtctccaaggggtggagattgctagcgcccatcacggcgtacgctcagcagacaaggggcctcctagggtgtataatcaccagcctgaccggccgggacaaaaaccaagtggagggtgaagtccagattgtgtcaactgctgcccaaaccttcctggcaacgtgcatcaatggggtatgctggactgtttaccacggggccggaacgaggaccatcgatcacccaagggtcctgttatccagatgtataccaacgtagaccaggacctcgtgggctggcccgcccctcaaggtgcccgctcattgacaccctgcacctgcggctcctcggacctttacctggttacgaggcacgccgatgtcattcccgtgcgccggcggggtgatagcaggggcagcctgctttcgcccaggcctatctcttacttgaagggctctcggggggtccgctgttgtgccccgcgggacacgctgtcggcatattcagggccgcggtgtgcacccgtggagtggctaaagcggtggactttatccccgtggagaacctagagacaaccatgaggtccccggtgttcacggacaactcctctccgccagcagtgccccagagtttccaggtggcccacttgcatgctcccaccggcagcggtaagacaccaaggtcccggctgcatacgcagcccagggctacaaggtgctagtgctcaacccctctgttgccgcaactcttggctttggtgcctatatgtccaaggcccatggggtcgaccctaacatcaggaccggggtgaggacaatcactactggcagccccatcacgtactcaacctacggcaagttccttgccgatggcgggtgctcggggggtgccttgacataataatctgtgacgagtgccactccacggatgccacatccatcttgggcatcggcactgtccttgaccaagcagagactgcgggggcgagactggtcgtgctcgccaccgctacccctccgggctctgtcactgtgccccatcctaacatcgaggaggttgctctgtccaccaccggagagatccctttctatggcaaggctatcccccttgggtaatcaagggggggagacatctcatcttctgccattcaaagaagaagtgcgacgagctcgccgcaaagctggtcgcattgggcatcaatgccgtggcctactaccgcggtctcgacgtgtccgtcatcccgaccagcggtgatgttgtcgtcgtggcaaccgacgccctcatgactggctttaccggcgacttcgactcggtgatagactgcaacagtgtgtcacccagacagtcgacttcagccttgaccctacttttacaattgagacaaccacgcttccccaggatgctgtctcccgcactcagcgtcgaggcaggactggcagggggaagcctggcgtctatagatttgtggcaccgggggaacgcccctccggcatgttcgactcgtccgtcctctgtgagtgctatgacgcgggctgcgcttggtatggctcacgcccgccgagactacagttaggctacgagcgtacatgaacaccccggggcttcccgtgtgccaggaccatctagagttttgggaaggcgtctttacgggccttacccatatagacgcccatttcctatcccagacaaagcagagcggggaaaactttccttacctggtagcgtaccaagccaccgtgtgcgctagggcccaggcccctccccatcgtgggaccagatgtggaagtgcctgatccgcctcaaacccactctccatggaccaacacctctgctatacagactgggcgctgttcagaatgaagtcaccctgacgcacccaatcaccaagtacatcatgacatgcatgtcggccgacctggaggtc

SEQ ID NO: 727 - DNA, 4865 bp, Hepatitis C virus
ggcggtcagatcgttggtggagtttacttgttgccgcgcaggggccctagattgggtgtgcgcgcgacgaggaagacttccgagcggtcgcaacctcgaggtagacgtcagcctatccccaaggctctcggcccgagggcaggacctgggcgcagcccgggtaccctaggcctctctatggcaatgagggctgcgggtgggcgggatggctcctgtccccccgtggctctcggcctagctggggccccacagacccccggcgtaggtcgcgcaacttgggtaaggtcatcgatacccttacgtgcggcttcgccgacctcatggggtacataccgctcgtcggcgccctcttggaggcgctgccagggccctggcgcatggcgtccgggttctggaagacggcgtgaattatgcaacagggaaccttcctggttgctctttctctatcttccttctggccctgctctcttgtctgaccgtgcccgcttcagcctaccaagtgcgcaactccacggggctttaccatgtcaccaatgattgccccaactcgagtattgtgtacgggcggacgacaccatcctgcacactccggggtgcgtcccttgcgttcgcgagggtaacgcctcgaggtgttgggtggcgatgtcccccacggtggccaccagggacggcaagctccccacaacgcagcttcgacgacacatcgatctgtttgttgggggcgccaccctctgctcggccctctacgtgggggacttgtgcgggtctgtctttcttgtcgtcaactgttcactttctctcccaggcgccactggacgacgcaggactgcaattgttctatctatcccggccatataacgggccaccgcatggcatgggatatgatgatgaactggtcccctacggcggcgttggtaacggctcagctgcttcggatcccacaagccatcgtggacatgatcgctggtgctcactggggagtcctagcgggcatagcgttttctccatggtggggaactgggcgaaggtcctggtagtgctgctgctgtttgctggcgtcgacgcgaccacctacaccaccgggggagcagccgcttccgccgcgtctagcgtcgcaagtttctttgaccggggccctaagcagaacatccagctgatcaacaccaacggcagctggcacatcaacagaacggccctgaactgtaatgaaagcctcacgccggctggttagcagggctcatctactacagaaaattcaactcttcaggctgtcctgagaggatggccagctgccgacccctcaccgattttgaccaaggctggggccctatcagttacaccaatgggagtggccccgaccaccgcccttactgctggcactaccccccaaaaccttgtggtattgtgcccgcaaagagcgtgtgtggcccggtatctgcttcactcccagccctgtggtggtgggaacgaccgacaggttgggcgtgcctacctacaactggggtgacaatgacacggacgtcttcgtccttaacaacaccaggccaccgctgggcaattggttcggttgcacctggatgaactcaactggattcaccaaagtgtgcggggcgcctccttgctccatcggaggggtgggcaacaacaccttgcctgccccactgattgttttcgcaagcatccggaagccacatactctcggtgcggctccggtccctggatcacacccaggtgcttagtcaactacccttataggctttggcactatccttgtactgtcaactacaccatattcaaggtcaggatgtacgtgggaggggtcgagcacaggctggaagctgcttgcaactggacgcgaggcgagcgttgcgtctagaagacagggacaggtccgagctcagcccgctgctgctgtccaccacacagtggcaggtccttccgtgttccttcacgaccctgccagccttgtccaccggcctcatccacctccaccaaaacattgtggacgtgcagtacttgtacggggtggggtcgagcatcgtgtcctgggccgtcaagtgggagtacgtcgttctcctattccttctgctgcggacgcgcgcgtctgctcctgcttgtggatgatgttactcatatcccaagcggaggcagctttggagaacctcgtgatactcaatgcagcatccctggccgggacgcacggacttgtgcccttcctcgtgttcttctgctttgcatggtatttgaagggtaagtgggtgcccggagcggcctacgtcctctacggaatgtggcctctcctcctgccctgttagcgttgccccagcgggcatacgcgctggactcagaggcggccgcgtcgtgtggaggcgctgttcttgtcgggttgatggcgctcactctgtcaccatatttcaagcactatatcagctggtgcttgtggtggcttcagtattttctgaccagagtagaagcgcaattgcacatgtgggttccccccctcaacgttcgaggggggcgtgatgcatcatcttactcacgtgtgtcgtacacccgaccttgatattcgacatcaccaaactgctgcttgcagtcttcggtcccctctgggttcttcaggccagtttgcttaaagtaccctactttgtgcgcgttcaaggcctcctccggatctgtgcgctagtgcggaagatggtcggaggccattacgtgcaaatggccatcatcaagttgggggcgcttatggcacctacatctacaaccatctcactcctcttcgggactgggcgcacaacggcctgcgagatctggccgtggctgtagagccagtcgtcttctcccaaatggagaccaagctcatcacgtggggggcagacaccgccgcgtgcggtgacatcatcaacaacctgcccgtctccgcccgcaggggccaggagatactgctcggaccagccgatggaaggtctccaaggggtggagattgctagcacccatcacggcgtacgcccagcagacaaggggcctcctagggtgtataatcaccagcctgaccggccgggacaagaaccaagtggagggtgaagtccagattgtgtcaactgctgcccaaaccttcttggcaacgtgcatcaatggggtatgctggactgtttaccacggggccggaacgaggaccatcgatcacccaagggtcctgttatccagatgtataccaacgtagaccaggacctcgtgggctggcccgcccctcaaggtgcccgctcattgacaccctgcacctgcggctcctcggacctttacctggttacgaggcacgccgatgtcattcctgtgcgccggcggggtgatagcaggggcagcctgctttcgcccaggcctatctcttacttgaaaggctctcggggggtccgctgttgtgccccgcgggacacgctgtcggcatattcagggccgcggtgtgcacccgtggagtggctaaagcggtggactttatccccgtggagaacctagagacaaccatgaggtccccggtgttcacggacaactcctctccaccagcagtgccccagagtttccaggtggcccacttgcatgctcccaccggcagcggtaagacaccaaggtcccggctgcatacgcagcccagggctacaaggtgctagtgctcaacccctctgttgccgcaactcttggctttggtgcttatatgtccaaggcccatggggtcgaccctaacatcaggaccggggtgaggacaatcaccactggcagccccatcacgtactcaacctacggcaagttccttgccgatggcgggtgctcggggggtgccttgacataataatctgtgacgagtgccactccacggatgccacatccatcttgggcatcggtactgtccttgaccaagcagagactgcgggggcgaggctggttgtgctcgccaccgctacccctccgggctctgttactgtgccccatcctaacatcgaggaggttgctctgtccaccaccggagagatccctttctatggcaaggctatccccctcgggtaatcaagggggggagacatctcatcttctgccattcaaagaagaagtgcgacgagctcgccgcaaagctggtcgcattgggcatcaatgccgtggcctactaccgcggtctcgacgtgtccgtcatcccgaccagcggtgatgttgtcgtcgtggcaaccgacgccctcatgactggctttaccggcgacttcgactcggtgatagactgcaacagtgtgtcacccagacagtcgacttcagccttgaccctactttcacaattgagacaaccacgcttccccaggatgctgtctcccgcactcagcgtcggggcaggactggcagggggaagcctggcgtctatagatttgtggcaccgggggaacgcccctccggcatgttcgactcgtccgtcctctgtgagtgctatgacgcgggctgcgcttggtatggctcacgcccgccgagactacagttaggctacgagcgtacatgaacaccccggggcttcccgtgtgccaggaccatcttgagttttgggagggcgtctttacgggccttacccatatagatgctcatttcctatcccagacaaagcagagcggggaaaactttccttacctggtagcgtaccaagccaccgtatgcgctagggctcaagcccctccccatcgtgggaccagatgtggaagtgcctgatccgcctcaaacccactctccatggaccaacacctctgctatacagactgggcgctgttcagaatgaagtcaccctgacgcacccaatcaccaagtacatcatgacatgcatgtcggccgacctggaggtc

SEQ ID NO: 728 - DNA, 4864 bp, Hepatitis C virus
gcggtcagatcgttggtggagtttacttgttgccgcgcaggggccctagattgggtgtgcgcgcgacgaggaagacttccgagcggtcgcaacctcgaggtagacgtcagcctatccccaaggctcgcggcccgagggcaggacctgggcgcagcccggataccctaggcctctctatggcaatgagggctgcgggtgggcgggatggctcctgtccccccgtggctctcggcctagctggggccccacagacccccggcgtaggtcgcgcaatttgggtaaggtcatcgatacccttacgtgcggcttcgccgacctcatggggtacataccgctcgtcggcgccctcttggaggcgctgccagagccctggcgcatggcgtccgggttctggaagacggcgtgaattatgcaacagggaaccttcctggttgctctttctctatcttccttctggccctgctctcttgtctgaccgtgcccgcttcagcctaccaagtgcgcaactccacggggctttaccatgtcaccaatgattgccccaactcgagtattgtgtacgagcggacgacaccatcctgcacactccggggtgcgtcccttgcgttcgcgagggtaacgcctcgaggtgttgggtggcgatgtcccccacggtggccaccagggacggcaagctccccacaacgcagcttcgacgacacatcgatctgtttgttgggggcgccaccctctgctcggccctctacgtgggggacttgtgcgggtctgtctttcttgtcggcaactgttcactttctctcccaggcgccactggacgacgcaggactgcaattgttctatctatcccggccatataacgggccaccgcatggcatgggatatgatgatgaactggtcccctacggcggcgttggtaacggctcagctgcttcggatcccacaagccatcgtggacatgatcgctggtgctcactggggagtcctagcgggcatagcgtattctccatggtggggaactgggcgaaggtcctggtagtgctgctgctgtttgctggcgtcgatgcgaccacctacaccaccgggggagcagccgcttccgccgcgtttaaggtcgcaagtttctttaacccgggccctaagcagaacatccagctgatcaacaccaacggcagttggcacatcaacagaacggccctgaactgtaatgaaagcctcaagccggctggttagcagggctcatttactaccaaaaattcaactcttcaggctgtcccgagaggatggccagctgccgacccctcaccgattttgaccagggctggggccctatcagttacaccaatgggagtggccccgaccaccgcccttactgctggcactaccccccaaaaccttgtggtattgtgcccgcaaagagcgtgtgtggcccggtatatgcttcactcccagccctgtggtggtgggaacgaccgacaggttgggcgtgcctacctacaactggggtgacaatgacacggacgtcttcgtccttaacaacaccaggccaccgctgggcaattggttcggttgcacctggatgaactcaactggattcaccaaagtgtgcggagcgcccccttgctccatcggaggggtgggcaacaacaccttgcttgccccactgactgttttcgcaagcatccggaagccacatactctcggtgcggctccggtccctggatcacacccaggtgcttagtcaactacccttataggctttggcactatccttgtaccgtcaactacaccatattcaaggtcaggatgtacgtgggaggggtcgagcacaggctggaagctgcttgcaactggacgcgaggcgagcgttgcgactagaagacagggacaggtccgagctcagccctctgctgctgtccaccacacagtggcaggtccttccgtgttccttcacgaccctgccagccttgtccaccggcctcatccacctccaccaaaacattgtggacgtgcagtacttgtacggggtggggtcgagcattgtgtcctgggccgttaagtgggagtacgtcgttctcctattccttctgctgcggacgcgcgcgtctgctcctgcttgtggatgatgttactcatatcccaagcggaggcagctttggagaacctcgtaatactcaatgcagcatccctggccgggacgcacggacttgtgcccttcctcgtgttcttctgctttgcatggtatttgaagggtaagtgggtgcccggagcagcctacgtcctctacggaatgtggcctctcctcctgctctgttagcgttgccccagcgggcatacgcgctggactcagaggcggccgcgtcgtgtggaggcgctgttcttgtcgggttgatggcgctcactctgtcaccatatttcaagcactatatcagctggtgcctgtggtggcttcagtattttctgaccagagtagaggcgcaattgcacatgtgggttccccccctcaatgttcgaggggggcgtgatgcatcatcttactcacgtgtgtcgtacacccgaccttgatattcgacatcaccaaactgctgcttgccgtcttcggtcccctctgggttcttcaggccagtttgcttaaagtaccctactttgtgcgcgttcaaggcctcctccggatctgtgcgctagtgcggaagatggctggaggccattacgtgcaaatggccatcatcaagttgggggcgcttacggcacctacatctacaaccatctcactcctcttcgggactgggcgcacaacggcctgcgagatctggccgtggctgtagagccagtcgtcttctcccaaatggagaccaagctcatcacgtggggggcagacaccgccgcgtgcggtgacatcatcaacaacctgcccgtctccgcccgcaggggccaggagatactgctcggaccagccgatggaatgtctccaaggggtggagattgctggcacccatcacggcgtacgcccagcagacaaggggcctcctagggtgtataatcaccagcctgaccggccgggacaaaaaccaagtggagggtgaagtccagattgtgtcaactgctgcccaaaccttcctggcaacgtgcatcaatggggtatgctggactgtttaccacggggccggaacgaggaccatcgctcacccaagggtcctgttatccagatgtataccaacgtagaccaggacctcgtgggctggcccgcccctcaaggtgcccgctcattgacaccctgcacctgcggctcctcggacctttacctggttacgaggcacgccgatgtcattcccgtgcgccggcggggtgatagcaggggcagcctgctttcgcccaggcctatctcttacttgaaaggctctcggggggtccgctgttgtgccccgcgggacacgccgtcggcatattcagggccgcggtgtgcacccgtggagtggctaaagcggtggactttatccccgtggagaacctcgagacaaccatgaggtccccggtgttcacggacaactcctctccgccagcagtgccccagagtttccaggtggcccacttgcacgctcccaccggcagcggtaagagaccaaggtcccggccgcatacgcagcccagggctacaaggtgctagtgctcaacccctctgttgccgcaactcttggctttggtgcttatatgtccaaggcccatggggtcgacccaaacatcaggaccggggtgaggacaatcaccactggcagccccatcacgtactcaacctacggcaagttccttgccgatggcgggtgctcggggggtgcttagacataataatctgtgacgagtgccactccacggatgccacatccatcttgggcatcggcactgtccttgaccaagcagagactgcgggggcgagactggtcgtgctcgccaccgctacccctccgggctctgtcactgtgccccatcctaacatcgaggaggttgctctgtccaccaccggagagatccctttctatggcaaggctatcccccttgagtaatcaagggggggagacatctcatcttctgccattcaaagaagaagtgcgacgagctcgccgcaaagctggtcgcattgggcatcaatgccgtggcctactaccgcggtctcgacgtgtccgtcatcccgaccagcggtgatgttgtcgtcgtggcaaccgatgccctcatgactggctttaccggcgacttcgactcggtgatagactgcaacactgtgtcacccagacagtcgacttcagccttgaccctactttcacaattgagacaaccacgcttccccaggatgctgtctcccgcactcagcgtcggggcaggaccggcagggggaagcccggcgtctatagatttgtggcaccgggggaacgcccctccggcatgttcgactcgtccgtcctctgtgagtgctatgacgcgggctgcgcttggtatgactcacgcccgccgagactacagttaggctacgagcgtacatgaacaccccggggcttcccgtgtgccaggaccatcttgagttttgggagggtgtctttacgggccttacccatatagatgcccatttcctatcccagacaaagcagagcggggaaaactttccttacctggtagcgtaccaagccaccgtgtgcgctagggctcaagcccctccccctcgtgggaccagatgtggaagtgcctgatccgcctcaaacccactctccatggaccaacacctctgctatacagactgggcgctgttcagaatgaagtcaccctgacgcacccaatcaccaagtacatcatgacatgcatgtcggccgacctggaggtc

SEQ ID NO: 729 - DNA, 4864 bp, Hepatitis C virus
gcggtcagatcgttggtggagtttacttgttgccgcgcaggggccctagattgggtgtgcgcgcgacgaggaagacttccgagcggtcgcaacctcgaggtagacgtcagcctatccccaaggctcgcggcccgagggcaggacctgggcgcagcccgggtaccctaggcccctctatggcaatgagggctgcgggtgggcgggatggctcctgtccccccgtggctctcggcctagctggggccccacagacccccggcgtaggtcgcgcaatttgggtaaggtcatcgatacccttacgtgcggcttcgccgacctcatggggtacataccgctcgtcggcgccctcttggaggcgctgccagggccctggcgcatggcgtccgagttctggaagacggcgtgaattatgcaacagggaaccttcctggttgctctttctctatcttcctcttggccctgctctcttgcctgaccgtgcccgcttcagcctaccaagtgcgcaactccacggggctctaccatgtcaccaatgattgccccaactcgagtattgtgtacgagcggacgacaccatcctacacactccggggtgcgtcccttgcgttcgcgagggtaacgcctcgaggtgttgggtggcgatgtcccccacggtggccaccagggacggcaagctccccacaacgcagcttcgacgacacatcgatctgtttgttgggggcgccaccctctgctcggccctctacgtgggggacttgtgcgggtctgtctttcttgtcggcaactgttcactttctctcccaggcgccactggacgacgcaggactgcaactgttctatctatcccggccatataacgggccaccgcatggcatgggatatgatgatgaactggtcccctacggcggcgttggtaacggctcagctgcttcggctcccacaagccatcttggacatgatcgctggtgctcactggggagtcctagcgggcatagcgtattctccatggtggggaactgggcgaaggtcctagtagtgctgttgctgtttgctggcgtcgacgcgaacacctacaccaccgggggaacaatggcttccgccgcgtatggggttgcaagtctcttcaacgtaggccctaagcagaacatccagctgatcaacaccaacggcagttggcacatcaacagaacggccctgaactgtaatgaaagcctcaagccggctggttagcagggctcctctacttccaaaaattcaactcttcaggctgtcccgagaggatggccagctgccgacccatcaccgatttcgtccagggctggggccctatcagttacaccaatgggagtggccccgaccaccgcccttactgctggcactaccccccaaaaccttgtggtattgtgcctgcaaagagcgtgtgtggcccggtatatgcttcactcccagccctgtggtggtgggaacgaccgacagactgggcgtgcctacctacacctggggtgaaaatgacacggacgtcttcgtccttaacaacaccaggccaccgctgggcaattggttcggttgcacctggatgaactcaactggattcaccaaagtgtgcggagcgcccccttgctccatcggaggggtgggcaacaacaccttgcttgccccactgattgctttcgcaagcatccggaagccacatactctcggtgcggctccggtccctggatcacacccaggtgcttggtcaactacccttataggctttggcactatccttgtaccgtcaactacaccatattcaaggtcaggatgtacgtggggggggtcgagcacaggctggaagctgcctgcaactggacgcgaggcgagcgttgcgactagaagacagggacaggtccgagctcagcccgctgctgctgtccaccactcagtggcaggtccttccgtgttccttcacgaccctgccagccttgtccaccggcctcatccacctccaccaaaacattgtggacgtgcagtacttgtacggggtggggtcgagcattgtgtcctgggccgttaagtgggagtacgtcgttctcctcttccttctgctgcagacgcgcgcgtctgctcctgcttgtggatgatgttactcatatcccaagcagaggcagctttggagaacctcgtaatactcaatgcagcatccctggccgggacgcacggacttgtgcccttcctcgtgttcttctgctttgcatggtatttgaagggtaagtgggtgcccggagcggcctacgtcctctacggaatgtggcctctcctcctgctctgttagcgttgccccagcgggcatacgcactggactcagaggcggccgcgtcgtgtggcggcgctgttcttgtcgggttgatggcgctcactctgtcaccatatttcaagcactatatcagctggtgcttgtggtggcttcagtattttctgaccagagtagaggcgcaattgcacatgtgggttccccccctcaacgttcgaggggggcgtgatgcatcatcttactcacgtgtgtcgtgcacccgaccttgatattcgacatcaccaaactgctgcttgccatcttcggtcccctctgggttcttcaggccagtttgcttaaggtaccctactttgtgcgcgttcaaggcctcctccggatctgcgcgctagtgcggaagatggccggaggccattacgtgcaaatggccatcatcaagttgggggcgcttacggcacctacatctacaaccatctcactcctcttcgggactgggcgcacaacggcctgcgagatctggccgtggctgtagagccagtcgtcttctcccaaatggagaccaagctcatcacgtggggggcagacaccgccgcgtgcggtgacatcatcaacaacctgcccgtctccgcccgcaggggccaggagatactgctcggaccagccgatggaatgtctccaaggggtggagattgctggcacccatcacggcgtacgcccagcagacaaggggcctcctagggtgtataatcaccagcttgaccggccgggacaagaaccaagtggagggtgaagtccagattgtgtcaactgctgcccaaaccttcctggcaacgtgcatcaatggggtatgctggactgtttaccacggggccggaacgaggaccatcgctcacccaagggtcctgttatccagatgtataccaacgtggaccaggacctcgtgggctggcccgcccctcaaggtgcccgctcattgacaccctgcacctgcggctcctcggacctttacctggttacgaggcacgccgatgtcatccccgtgcgccggcggggtgataacaggggcagcctgctttcgcccaggcctatctcttatttgaaaggctctcggggggtccgctgttgtgccccgcgggacacgctgtcggcatcttcagggccgcggtgtgcacccgtggagtggctaaagcggtggactttatccccgtggagaacctagagacaaccatgaggtccccggtgttcacagacaactcctctccgccagcagtgccccagagtttccaggtggcccacttgcatgctcccaccggcagcggtaagagaccaaggtcccggctgcatacgcagcccagggctacaaggtgctagtgctcaacccctctgttgccgcaactcttggctttggtgcttatatgtccaaggcccatggggtcgaccctaacatcaggaccggggtgaggacaattaccactggcagccccatcacgtactcaacctacggcaagttccttgccgatggcgggtgctcggggggtgcctagacataataatctgtgacgagtgccactccacggatgccacatccatcttgggcatcggcactgtccttgaccaagcagagactgcgggggcgagactggtcgtgctcgccaccgctacccctccgggttctgtcactgtgccccatcctaacatcgaggaggttgctctgtccaccaccggagagatccctttctatggcaaggctatcccccttgagtaatcaagggggggagacatctcatcttctgccattcaaagaagaagtgcgacgagctcgccgcaaagctggtcgcattgggcatcaatgccgtggcctactaccgcggtctcgacgtgtccgtcattccgactagcggtgatgttgtcgtcgtggcaaccgatgccctcatgactggctataccggcgacttcgactcggtgatagactgcaacactgtgtcacccagacagtcgacttcagccttgaccctactttcacaattgagacaaccacgcttccccaggatgctgtctcccgcactcagcgtcggggcaggactggcagggggaagcctggcgtctatagattcgtggcaccgggggaacgcccctccggcatgttcgactcgtccgtcctctgtgagtgctatgacgcgggctgcgcttggtatgactcacgcccgccgagactacagttaggctacgagcgtacatgaacaccccggggcttcccgtgtgccaggaccatcttgagttttgggagggcgtctttacgggcctcacccatatagatgcccatttcctatcccagacaaagcagagcggggaaaactttccttacctggtagcgtaccaagccaccgtgtgcgctagggctcaagcccctccccctcgtgggaccagatgtggaagtgcctgatccgcctcaaacccactctccatggaccaacacctctgctatacagactgggcgctgtccagaatgaagtcaccctgacgcacccaatcaccaagtacatcatgacatgcatgtcggccgacctggaggtc

SEQ ID NO: 730 - DNA, 4864 bp, Hepatitis C virus
gcggtcagatcgttggtggagtttacttgttgccgcgcaggggccctagattgggtgtgcgcgcgacgaggaagacttccgagcggtcgcaacctcgaggtagacgtcagcctatccccaaggctcgcggcccgagggcaggacctgggcgcagcccggataccctaggcctctctatggcaatgagggctgcgggtgggcgggatggctcctgtccccccgtggctctcggcctagctggggccccacagacccccggcgtaggtcgcgcaacttgggtaaggtcatcgatacccttacgtgcggcttcgccgacctcatggggtacataccgctcgtcggcgccctcttggaggcgctgccagggccctggcgcatggcgtccgggttctggaagacggcgtgaattatgcaacagggaaccttcctggttgctctttctctatcttccttctggccctgctctcttgtctgaccgtgcccgcttcagcctaccaagtgcgcaactccacggggctttaccatgtcaccaatgattgccccaactcgagtattgtgtacgagcggacgacaccatcctgcacactccggggtgcgtcccttgcgttcgcgagggtaacgcctcgaggtgttgggtggcgatgtcccccacggtggccaccagggacggcaagctccccacaacgcagcttcgacgacacatcgatctgtttgttgggggcgccaccctctgctcggccctctacgtgggggacttgtgcgggtctgtctttcttgtcggcaactgttcactttctctcccaggcgccactggacgacgcaggactgcaattgttctatctatcccggccatataacgggccaccgcatggcatgggatatgatgatgaactggtcccctacggcggcgttggtaacggctcagctgcttcggatcccacaagccatcgtggacatgatcgctggtgctcactggggagtcctagcgggcatagcgtattctccatggtggggaactgggcgaaggtcctggtagtgctgctgctgtttgctggcgtcgacgcgaccacctacaccaccgggggagcagccgcttccgccgcgtctagcgtcgcaagtttctttgaccggggccctaagcagaacatccagctgatcaacaccaacggcagctggcacatcaacagaacggccctgaactgtaatgaaagcctcaagccggctggttagcagggctcatctactacagaaaattcaactcttcaggctgtcctgagaggatggccagctgccgacccctcaccgactttgaccaaggctggggccctatcagttacaccaatgggagtggccccgaccaccgcccttactgctggcactaccccccaaaaccttgtggtattgtgcccgcaaagagcgtgtgtggcccggtatatgcttcactcccagccctgtggtggtgggaacgaccgacaggttgggcgtgcctacctacaactggggtgacaatgacacggacgtcttcgtccttaacaacaccaggccaccgctgggcaattggttcggttgcacctggatgaactcaactggattcaccaaagtgtgcggggcgcctccttgctccatcggaggggtgggcaacaacaccttgcttgccccactgattgttttcgcaagcatccggaagccacatactctcggtgcggctccggtccctggatcacacccaggtgcttagtcaactacccttataggctttggcactatccttgtactgtcaactacaccatattcaaggtcaggatgtacgtgggaggggtcgagcacaggctggaagctgcttgcaactggacgcgaggcgagcgttgcgactagaagacagggacaggtccgagctcagcccgctgctgctgtccaccacacagtggcaggtccttccgtgttccttcacgaccctgccagccttgtccaccggcctcatccacctccaccaaaacattgtggacgtgcagtacttgtacggggtggggtcgagcattgtgtcctgggccgtcaagtgggagtacgtcgttctcctattccttctgctgcggacgcgcgcgtctgctcctgcttgtggatgatgttactcatatcccaagcggaggcagctttggagaacctcgtgatactcaatgcagcatccctggccgggacgcacggacttgtgcccttcctcgtgttcttctgctttgcatggtatttgaagggtaagtgggtgcccggagcggcctacgtcctctacggaatgtggcctctcctcctgctctgttagcgttgccccagcgggcatacgcgctggactcagaggcggccgcgtcgtgtggaggcgctgttcttgtcgggttgatggcgctcactctgtcaccatatttcaagcactatatcagctggtgcttgtggtggcttcagtattttctgaccagagtagaggcgcaattgcacatgtgggttccccccctcaacgttcgaggggggcgtgatgcatcatcttactcacgtgtgtcgtacacccgaccttgatattcgacatcaccaaactgctgcttgccgtcttcggtcccctctgggttcttcaggccagtttgcttaaagtgccctactttgtgcgcgttcaaggcctcctccggatctgtgcgctagtgcggaagatggtcggaggccattacgtgcaaatggccatcatcaagttgggggcgcttacggcacctacatctacaaccatctcactcctcttcgggactgggcgcacaacggcctgcgagatctggccgtggctgtagagccagtcgtcttctcccaaatggagaccaagctcatcacgtggggggcagacaccgccgcgtgcggtgacatcatcaacaacctgcccgtctccgcccgcaggggccaggagatactgctcggaccagccgatggaatgtctccaaggggtggagattgctagcacccatcacggcgtacgcccagcagacaaggggcctcctagggtgtattatcaccagcctgaccggccgggacaagaaccaagtggagggtgaagtccagattgtgtcaactgctgcccaaaccttcttggcaacgtgcatcaatggggtatgctggactgtttaccacggggccggaacgaggaccatcgctcacccaagggtcctgttatccagatgtataccaacgtagaccaggacctcgtgggctggcccgcccctcaaggtgcccgctcattgacaccctgcacctgcggctcctcggacctttacctggttacgaggcacgccgatgtcattcctgtgcgccggcggggtgatagcaggggcagcctgctttcgcccaggcctatctcttacttgaaaggctctcggggggtccgctgttgtgccccgcgggacacgctgtcggcatattcagggccgcggtgtgcacccgtggagtggctaaagcggtggactttatccccgtggagaacctagagacaaccatgaggtccccggtgttcacggacaactcctctccaccagcagtgccccagagtttccaggtggcccacttgcatgctcccaccggcagcggtaagagaccaaggtcccggctgcatacgcagcccagggctacaaggtgctagtgctcaacccctctgttgccgcaactcttggctttggtgcttatatgtccaaggcccatggggtcgaccctaacatcaggaccggggtgaggacaatcaccactggcagccccatcacgtactcaacctacggcaagttccttgccgatggcgggtgctcggggggtgcctagacataataatctgtgacgagtgccactccacggatgccacatccatcttgggcatcggcactgtccttgaccaagcagagactgcgggggcgagactggtcgtgctcgccaccgctacccctccgggctctgttactgtgccccatcctaacatcgaggaggttgctctgtccaccactggagagatccctttctatggcaaggctatccccctcgagtaatcaagggggggagacatctcatcttctgccattcaaagaagaagtgcgacgagctcgccgcaaagctggtcgcattgggcatcaatgccgtggcctactaccgcggtctcgacgtgtccgtcatcccgaccagcggtgatgttgtcgtcgtggcaaccgacgccctcatgactggctttaccggcgacttcgactcggtgatagactgcaacactgtgtcacccagacagtcgacttcagccttgaccctactttcacaattgagacaaccacgcttccccaggatgctgtctcccgcactcagcgtcggggcaggactggcagggggaagcctggcgtctatagatttgtggcaccgggggaacgcccctccggcatgttcgactcgtccgtcctctgtgagtgctatgacgcgggctgcgcttggtatgactcacgcccgccgagactacagttaggctacgagcgtacatgaacaccccggggcttcccgtgtgccaggaccatcttgagttttgggagggcgtctttacgggccttacccatatagatgcccatttcctatcccagacaaagcagagcggggaaaactttccttacctggtagcgtaccaagccaccgtatgcgctagggctcaagcccctccccctcgtgggaccagatgtggaagtgcctgatccgcctcaaacccactctccatggaccaacacctctgctatacagactgggcgctgttcagaatgaagtcaccctgacgcacccaatcaccaagtacatcatgacatgcatgtcggccgacctggaggtc

SEQ ID NO: 731 - DNA, 4864 bp, Hepatitis C virus
gcggtcagatcgttggtggagtttacttgttgccgcgcaggggccctagattgggtgtgcgcgcgacgaggaagacttccgagcggtcgcaacctcgaggtagacgtcagcctatccccaaggctcgcggcccgagggcaggacctgggcgcagcccggataccctaggcctctctatggcaatgagggctgcgggtgggcgggatggctcctgtccccccgtggctctcggcctagctggggccccacagacccccggcgtaggtcgcgcaatttgggtaaggtcatcgatacccttacgtgcggcttcgccgacctcatggggtacataccgctcgtcggcgccctcttggaggcgctgccagggccctggcgcatggcgtccgggttctggaagacggcgtgaattatgcaacagggaaccttcctggttgctctttctctatcttccttctggccctgctctcttgcctgaccgtgcccgcttcagcctaccaagtgcgcaactccacggggctttaccatgtcaccaatgattgccccaactcgagtattgtgtacgagcggacgacaccatcctgcacactccggggtgcgtcccttgcgttcgcgagggtaacgcctcgcggtgttgggtagcgatgtcccccacggtggccaccagggacggtaagctccccacaacgcagcttcgacgacacatcgatctgtttgttgggggcgccaccctgtgctcggccctctacgtgggggacttgtgcgggtctgtctttcttgtcggcaactgttcactttctctcccaggcgccactggacgacgcaggactgcaattgttctatctatcccggccatataacgggccaccgcatggcatgggatatgatgatgaactggtcccctacggcggcgttggtaacggctcagctgcttcggatcccacaagccatcgtggacatgatcgctggtgctcactggggagtcctagcgggcatagcgtattctccatggtggggaactgggcgaaggtcctggtagtgctgttgctgtttgctggcgtcgacgcgaccacctacaccaccgggggagcagccgcttccaccgcgtctagggtcgcaagtttctttgacctgggccctcagcagaacatccagctgatcaacaccaacggcagttggcacatcaacagaacggccctgaactgtaatgaaagcctcaagccggctggttagcagggctcatctacttcagaaaattcaactcttcaggctgtcctgagaggatggccagctgccgacccctcaccgacttcgaccagggctggggccctatcagttacaccaatgggagcggccccgaccaccgcccttactgctggcactaccccccaaaaccttgcggtattgtgcccgcaaagagcgtgtgtggcccggtatatgcttcactcccagccctgtggtggtgggaacgaccgacaggttgggcgtgcctacctacaactggggtgacaatgacacggacgtcttcgtccttaacaacaccaggccaccgctgggcaattggttcggttgcacctggatgaactcaactggattcaccaaagtgtgcggagcgcccccttgctccatcggaggggtgggcaacaacaccttgcttgccccactgattgttttcgcaagcatccggaagccacatactctcggtgcggttccggtccctggatcacacccaggtgcttggtcaactacccttacaggctttggcactatccttgtaccgtcaactacaccatattcaaggtcaggatgtacgtgggaggggtcgagcacaggctggaagctgcttgcaactggacgcgaggcgagcgttgcgactagaagacagggacaggtccgagctcagcccgctgctgctgtccaccacacagtggcaggtccttccatgttccttcacgaccctgccagccttgtccaccggcctcatccacctccaccaaaacattgtggacgtgcagtacttgtacggggtggggtcgagcattgtgtcctgggccgttaagtgggagtacgtcgttctcctattccttctgctgcggacgcgcgcgtctgctcctgcttgtggatgatgttactcatatcccaagcggaggcagctttggagaacctcgtgatactcaatgcagcatccctggccgggacgcatggacttgtgcccttccttgtgttcttctgctttgcatggtatttgaagggtaagtgggtgcccggagcggcctacgtcctctacggcatgtggcctctcctcctgctctgttagcgttgccccagcgggcatacgcgctggactcagaggcggccgcgtcgtgtggaggtgctgttcttgtcgggttgatggcgctcactctgtcaccatatttcaagcactatatcagctggtgcttgtggtggcttcagtatttcctgaccagagcagaggcgcaattgcacatgtgggttccccccctcaacgttcgaggggggcgtgatgcatcatcttactcacgtgtgtcgtgcacccggccttgatattcgacatcaccaaactgctgcttgccgtcttcggtcccctctgggttcttcaggccagtttgcttaaagtaccctactttgtgcgcgttcaaggcctcctccggatctgtgcgctagtgcggaagatggccggaggccattacgtgcaaatggccatcatcaagctgggggcgcttacggcacctacatctacaaccatctcactcctcttcgggactgggcgcacaacggcctgcgagatctggccgtggctgtagagccagtcgtcttctcccaaatggagaccaagctcatcacgtggggggcagacaccgccgcgtgcggtgacatcatcaacaacctgcccgtctccgcccgcaggggccaggagatactgctcggaccagccgatgcgatgtctccaaggggtggagattgctagcgcccatcacagcgtacgcccagcagacaaggggcctcctagggtgcataatcaccagcctgaccggccgggacaaaaaccaagtggagggtgaagtccagattgtgtcaactgctgcccaaaccttcctggcaacgtgcatcaatggggtatgctggactgtttaccacggggccggaacgaggaccatcgctcacccaagggtcctgttatccagatgtataccaacgtagaccaggacctcgtgggctggcccgcccctcaaggtgcccgctcattgacaccctgcacctgcggctcctcggacctttacctggttacgaggcacgccgatgtcattcccgtgcgccggcggggtgatagcaggggcagcctgctttcgcccaggcctatctcttacttgaagggctctcggggggtccgctgttgtgccccgcgggacacgctgtcggcatattcagggccgcggtgtgcacccgtggagtggctaaagcggtggactttatccccgtggagaacctagagacaaccatgaggtccccggtgttcacggacaactcctctccgccagcagtgccccagagtttccaggtggcccacttgcatgctcccaccggcagcggtaagagaccaaggtcccggctgcgtacgcagcccagggctacaaggtgctagtgctcaacccctctgttgccgcaactcttggctttggtgcttatatgtccaaggcccatggggtcgaccctaacatcaggaccggggtgaggacaatcactactggcagccctatcacgtactcaacctacggcaagttccttgccgatggcgggtgctcggggggtgcctagacataataatctgtgacgagtgccactccacggatgccacatccatcttgggcatcggcactgtccttgaccaagcagagactgcgggggcgagactggtcgtgctcgccaccgctacccctccgggctctgtcactgtgccccatcctaacatcgaggaggttgctctgtccaccaccggagagatccctttctatggcaaggctatcccccttgagtaatcaagggggggagacatctcatcttctgccattcaaagaagaagtgcgacgagctcgccgcaaagctggttgcattgggcatcaatgccgtggcctactaccgcggtctcgacgtgtccgtcatcccgaccagcggtgatgttgtcgtcgtggcaaccgacgccctcatgactggctttaccggcgacttcgactcggtgatagactgcaacattgtgtcacccagacagtcgacttcagccttgaccctacttttacaattgagacaaccacgcttccccaggatgctgtctcccgcactcagcgtcgaggcaggactggcagggggaagcctggcgtctatagatttgtggcaccgggggaacgcccctccggcatgttcgactcgtccgtcctctgtgagtgctatgacgcgggctgcgcttggtatgactcacgcccgccgagactacagttaggctacgagcgtacatgaacaccccggggcttcccgtgtgccaggaccatcttgagttttgggagggcgtctttacgggccttacccatatagacgcccatttcctatcccagacaaagcagagcggggaaaactttccttacctggtagcgtaccaagccaccgtgtgcgctagggctcaagcccctccccctcgtgggaccagatgtggaagtgcctgatccgcctcaaacccactctccatggaccaacacctctgctatacagactgggcgctgttcagaatgaagtcaccctgacgcacccaatcaccaagtacatcatgacatgcatgtcggccgacctggaggtc

SEQ ID NO: 732 - DNA, 4536 bp, Hepatitis C virus
ataccgctcgtcggcgcccctctcggaggcgctgccagggccctggcgcatggcgtccgggttctggaagacggtgtgaattatgcaacagggaatcttcctggttgctctttctctatcttcctccggccctgctctcttgtctgaccgtgcccgcttcagcctaccaagtgcgcaactccacggggctctaccatgtcaccaatgattgccccaactcgagtattgtgtacgaggcggacgacaccatcctacacactccggggtgcgtcccttgcgttcgcgagggtaacgcctcgaggtgttgggtggcgatgtcccccacggtggccaccagggacggcagctccccacaacgcagcttcgacgacacatcgatctgtttgttgggggcgccaccctctgctcggccctctacgtgggggacttgtgcgggtctgtctttcttgtcggtcaactgttcactttctctcccaggcgccactggacgacgcaggactgcaactgttctatctatcccggccatataacgggccaccgcatggcatgggatatgatgatgactggtcccctacggcggcgttggtaacggctcagctgcttcggctcccacaagccatcttggacatgatcgctggtgctcactggggagtcctagcgggcatagcgtatttctccatggtggggaactgggcgaaggtcctagtagtgctgttgctgtttgctggcgtcgacgcggacacctacaccaccgggggaacaatggcttccgccgcgtatgggttgcaagtctcttcaacgtgggccctaagcagaacatccagctgatcaacaccaacggcagttggcacatcaacaggacggccctgaattgtaatgaaagcctcaacgccggttggttagcagggctcctctacttccaaaaattcaactcttcaggctgtcccgagaggatggccagctgccggcccatcaccgatttcgtccagggctggggcctatcagttacaccaatgggagtggccccgaccaccgcccttactgctggcactaccccccaaaaccttgtggtattgtgcctgcaaagagcgtgtgtggcccggtatactgcttcactcccagccctgtggtggtgggaacgaccgacagactgggcgtgcctacctacacctggggtgaaaatgacacggacgtcttcgtccttaacaacaccaggcaccgctgggcaattggttcggttgcacctggatgaactcaactggattcaccaaagtgtgcggagcgcccccttgctccatcggaggggtgggcaacaacaccttgctctgccccactgattactttcgcaagcatccggaagccacatactctcggtgcggctccggtccctggatcacacccaggtgcttggtcaactacccttataggctttggcctatccttgtaccgtcaactacaccatattcaaggtcaggatgtacgtggggggggtcgagcacaggctggaagctgcctgcaactggacgcgaggcgagcgttgcgatctagaagacagggacaggtccgagctcagcccgctgctgctgtccaccactcagtggcaggtccttccgtgttccttcacgacccttccagccttgtccaccggcctcaccacctccaccaaaacattgtggacgtgcagtacttgtacggggtggggtcgagcattgtgtcctgggccgttaagtgggagtacgtcgttctcctcttccttctgcttgcagacgcgcgcgtctgctcctgcttgtggatgatgttactcatatcccaagcagaggcagctttggagaacctcgtaatactcaatgcagcatccctggccgggacgccggacttgtgcccttcctcgtgttcttctgctttgcatggtatttgaagggtaagtgggtgcccggagcggcctacgtcctctacggaatgtggcctctcctcctgctcctgttagcgttgccccagcgggcatacgcactggactcagaggcggccgcgtcgtgtggcggcgctgttctcgtcgggttgatggcgctcactctgtcaccatatttcagcactatatcagctggtgcttgtggtggcttcagtattttctgaccagagtagaggcgcaattgcacatgtgggttccccccctcaacgttcgaggggggcgtgatgccatcatcttactcacgtgtgtcgtacacccgaccttgatattcgacatcactaaactgctgcttgccatcttcggtcccctctgggttcttcaggccagtttgcttaaggaccctactttgtgcgcgttcaaggcctcctccggatctgcgcgctagtgcggaagatggccggaggccattacgtgcaaatggccatcatcaagttgggggcgcttactggcacctacatctacaaccatctcactcctcttcgggactgggcgcacaacggccttcgagatctggccgtggctgtagagccagtcgtcttctcccaaatggagaccagctcatcacgtggggggcagacaccgccgcgtgcggtgacatcatcaacaacctgcccgtctccgcccgcaggggccaggagatactgctcggaccagccgatgggatggtctccaaggggtggagattgctggcacccatcacggcgtacgcccagcagacaaggggcctcctagggtgtatagtcaccagcttgaccggccgggacaagaaccaagggagggtgaagtccagattgtgtcaactgctgcccaaaccttcctggcaacgtgcatcaatggggtatgctggactgtttaccacggggccggaacgaggaccatcgcatcacccaagggtcctgttatccagatgtataccaacgtagaccaggacctcgtgggctggcccgcccctcaaggtgcccgctcattgacaccctgcacctgcggctcctggacctttacctggttacgaggcacgccgatgtcatccccgtgcgccggcggggtgatagcaggggcagcctgctttcgcccaggcctatctcttacttgaaaggctcctcggggggtccgctgttgtgccccgcgggacacgctgtcggcatcttcagggccgcggtgtgcacccgtggagtggctaaagcggtggactttatccccgtggagaaccagagacaaccatgaggtccccggtgttcacggacaactcctctccgccagcagtgccccagagtttccaggtggcccacttgcatgctcccaccggcagcggtaagagcaccaaggtcccggctgcatacgcagcccagggctacaaggtgctagtgctcaacccctctgttgccgcaactcttggctttggtgcttatatgtccaaggcccatggggcgaccctaacatcaggaccggggtgaggacaattaccactggcagccccatcacgtactcaacctacggcaagttccttgccgatggcgggtgctcggggggtgcctatgacataataatctgtgacgagtgccactccacggatgccacatccatcttgggcatcggcactgtccttgaccaagcagagactgcgggagcgagactggtcgtgctcgcaccgctacccctccgggttctgtcactgtgccccatcctaacatcgaggaggttgctctgtccaccaccggagagatcccattctatggcaaggctatcccccttgaggtaatcaagggggggagacatctcatcttctgccattcaaagaagaagtgcgacgagctcgccgcaaagctggtcgcattgggcatcaatgccgtggcctactaccgcgtcttgacgtgtccgtcattccgactagcggtgatgttgtcgtcgtggcaaccgatgccctcatgactggctataccggcgacttcgactcggtgatagactgcaacacgtgtgtcacccagacagtcgacttcagccttgaccctacttttacaattgagacaaccacgcttccccaggatgctgtctcccgcactcagcgtcggggcaggactggcaggggaagcctggcgtctatagatttgtggcaccgggggaacgcccctccggcatgttcgactcgtccgtcctctgtgagtgctatgacgcgggctgcgcttggtatgagctcacgcccgccgagaccacagttaggctacgagcgtacatgaacaccccggggcttcccgtgtgccaggaccatcttgagttttgggagggcgtctttacgggcctcaccatatagatgcccatttcctatcccagacaaagcagagcggggaaaactttccttacctggtagcgtaccaagccaccgtgtgcgctagggctcaagcccctcccccatcgtgggaccagatgtggaagtgcctgatccgcctcaaacccactctccatggaccaacacctctgctatacagactgggcgctgtccagaatgaagtcaccctgacgccccaatcaccaagtacatcatgacatgcatgtcggccgacctggaggtc

SEQ ID NO: 733 - DNA, 4536 bp, Hepatitis C virus
ataccgctcgtcggcgcccctcttggaggcgctgccagggccctggcgcatggcgtccgggttctggaagacggcgtgaattatgcaacagggaaccttcctggttgctctttctctatcttccttcggccctgctctcttgtctgaccgtgcccgcttcagcctaccaagtgcgcaactccacggggctttaccatgtcaccaatgattgccccaactcgagtattgtgtacgaggcggacgacaccatcctgcacactccggggtgcgtcccttgcgttcgcgagggtaacgcctcgcggtgttgggtggcgatgtcccccacggtggccaccagggacggcagctccccacaccgcagcttcgacgacacatcgatctgtttgttgggggcgccaccctctgctcggccctctacgtgggggacttgtgcgggtctgtctttcttgtcggtcaactgttcactttctctcccaggcgccactggacgacgcaggactgcaattgttctgtctatcccggccatataacgggccaccgcatggcatgggatatgatgatgactggtcccctacggcggcgttggtaacggctcagctgcttcggatcccacaagccatcgtggacatgatcgctggtgctcactggggagtcctagcgggcatagcgtatttctccatggtggggaactgggcgaaggtcctggtagtgctgctgctgtttgctggcgtcgacgcgaccacctacaccaccgggggagcagccgcttccaccgcgtctaggtcgcaagtttctttgacctgggccctcagcagaacatccagctgatcaacaccaacggcagttggcatatcaacagaacggccctaaactgtaatgaaagcctcaacgccggctggttagcagggctcatctacttcagaaaattcaactcttcaggctgtcctgagaggatggccagctgccgacccctcaccgacttcgaccagggctggggcctatcagttacaccaatgggagtggccccgaccaccgcccttactgctggcactaccctccaaaaccttgtggtattgtgcccgcaaagagcgtgtgtggcccggtatactgcttcactcccagccctgtggtggtgggaacgaccgacaggttgggcgtgcctacctacaactggggtgacaatgacacggacgtcttcgtccttaacaacaccaggcaccgctgggcaattggttcggttgcacctggatgaactcaactggattcaccaaagtgtgcggagcgcccccttgctccatcggaggggtgggcaacaacaccttgctctgccccactgactgttttcgcaagcatccggaagccacatactctcggtgcggctccggtccctggatcacacccaggtgcttagtcaactacccttacaggctttggcctatccttgtaccgtcaactacaccatattcaaggtcaggatgtacgtgggaggggtcgagcacaggctggaagctgcttgcaactggacgcgaggcgagcgttgtgatctagaagacagggacaggtccgagctcagcccgctgctgctgtccaccacacagtggcaggtccttccgtgttccttcacgaccctgccagccttgtccaccggcctcaccacctccaccaaaacattgtggacgtgcagtacttgtacggggtggggtcgagcattgtgtcctgggccgttaagtgggagtacgtcgttctcctattccttctgcttgcggacgcgcgcgtctgctcctgcttgtggatgatgttactcatatcccaagcggaggcagctttggagaacctcgtgatactcaatgcagcatccctggccgggacgctggacttgtgcccttccttgtgttcttctgctttgcatggtatttgaagggtaagtgggtgcccggagcggcctacgtcctctacggaatgtggcctctcctcctgctcctgttagcgttgccccagcgggcatacgcgctggactcagaggcggccgcgtcgtgtggaggcgctgttcttgtcgggttgatggcgctcactctgtcaccatatttcagcactatatcagctggtgcttgtggtggcttcagtattttctgaccagagcagaggcgcaattgcacatgtgggttccccccctcaacgttcgaggggggcgtgatgccatcatcttactcacgtgtgtcgtacacccggccttgatattcgacatcaccaaactgctgcttgccgtcttcggtcccctctgggttcttcaggccagtttgcttaaagaccctactttgtgcgcgttcaaggcctcctccggatctgtgcgctagtgcggaagatggccggaggccattacgtgcaaatggccatcatcaagttgggggcgcttaccggcacctacatctacaaccatctcactcctcttcgggactgggcgcacaacggcctgcgagatctggccgtggctgtagagccagtcgtcttctcccaaatggagaccagctcatcacgtggggggcagacaccgccgcgtgcggtgacatcatcaacaacctgcccgtctccgcccgcaggggccaggagatactgctcggaccagccgatggaatggtctccaaggggtggagattgctagcgcccatcacggcgtacgcccagcagacaaggggcctcctagggtgtataatcaccagcctgaccggccgggacaaaaaccaagggagggtgaagtccagattgtgtcaactgctgcccaaaccttcctggcaacgtgcatcaatggggtatgctggactgtttaccacggggccggaacgaggaccatcgcatcacccaagggtcctgttatccagatgtataccaacgtagaccaggacctcgtgggctggcccgcccctcaaggtgcccgctcattgacaccctgcacctgcggctcctggacctttacctggttacgaggcacgccgatgtcattcccgtgcgccggcggggtgatagcaggggcagcctgctttcgcccaggcctatctcttacttgaagggctcctcggggggtccgctgttgtgccccgcgggacacgctgtcggcatattcagggccgcggtgtgcacccgtggagtggctaaagcggtggactttatccccgtggagaaccagagacaaccatgaggtccccggtgttcacggacaactcctctccgccagcagtgccccagagtttccaggtggcccacttgcatgctcccaccggcagcggtaagagcaccaaggtcccggctgcatatgcagcccagggctacaaggtgctagtgctcaacccctctgttgccgcaactcttggctttggtgcttatatgtccaaagcccatggggcgaccctaacatcaggaccggggtgaggacaatcactactggcagccccatcacgtactcaacctacggcaagttccttgccgatggtgggtgctcggggggtgcctatgacataataatctgtgacgagtgccactccacggatgccacatccatcttgggcatcggcaccgtccttgaccaagcagagactgcgggggcgagactggtcgtgctcgcaccgctacccctccgggctctgtcactgtgccccatcctaacatcgaggaggttgctctgtccaccaccggagagatccctttctatggcaaggctattccccttgaggtaatcaagggggggagacatctcatcttctgccattcaaagaagaagtgcgacgagctcgccgcaaagctggtcgcattgggcatcaatgccgtggcctactaccgcgtctcgacgtgtccgtcatcccgaccagcggtgacgttgtcgtcgtggcaaccgacgccctcatgactggctttaccggcgacttcgactcggtgatagactgcaacacgtgtgtcacccagacagtcgacttcagccttgaccctacttttacaattgagacaaccacgcttccccaggatgctgtctcccgcactcagcgtcggggcaggactggcaggggaagcctggcgtctatagatttgtggcaccgggggaacgcccctccggcatgttcgactcgtccgtcctctgtgagtgctatgacgcgggctgcgcttggtatgagctcacgcccgccgagactacagttaggctacgagcgtacatgaacaccccggggcttcccgtgtgccaggaccatcttgagttttgggagggcgtctttacgggtcttaccatatagatgcccatttcctatcccagacaaagcagagcggggaaaactttccttacctggtagcgtaccaagccaccgtatgcgctagggctcaagcccctcccccatcgtgggaccagatgtggaagtgcctgatccgcctcaaacccactctccatggaccaacacctctgctatacagactgggcgctgttcagaatgaagtcaccctgacgccccaatcaccaagtacatcatgacatgcatgtcggccgacctggaggtc

SEQ ID NO: 734 - DNA, 4536 bp, Hepatitis C virus
ataccgctcgtcggcgcccctcttggaggcgctgccagggccctggcgcatggcgtccgggttctggaagacggcgtgaattatgcaacagggaatcttcctggttgctctttctctatcttccttcggccctgctctcttgtctgaccgtgcccgcttcagcctaccaagtgcgcaactccacggggctttaccatgtcaccaatgattgccccaactcgagtattgtgtacgaggcggacgacaccatcctgcacactccggggtgcgtcccttgcgttcgcgagggtaacgcctcgcggtgttgggtggcgatgtcccccacggtggccaccagggacggcagctccccacaacgcagcttcgacgacacatcgatctgtttgttgggggcgccaccctctgctcggccctctacgtgggggacttgtgcgggtctgtctttcttgtcggtcaactgttcactttctctcccaggcgccactggacgacgcaggactgcaattgttctatctatcccggccatataacgggccaccgcatggcatgggatatgatgatgactggtcccctacggcggcgttggtaacggctcagctgcttcggatcccacaagccatcgtggacatgatcgctggtgctcactggggagtcctagcgggcatagcgtatttctccatggtggggaactgggcgaaggtcctggtagtgctgctgctgtttgctggcgtcgacgcgaccacctacaccaccgggggagcagccgcttccaccgcgtctaagtcgcgagtttctttgacctgggccctcagcagaacatccagctgatcaacaccaacggcagttggcacatcaacagaacggccctgaactgtaatgaaagcctcaacgccggctggttagcagggctcatctacttcagaaaattcaactcttcaggctgtcctgagaggatggccagctgccgacccctcaccgacttcgaccagggctggggcctatcagttacaccaatgggagtggccccgaccaccgcccttactgctggcactaccccccaaaaccttgtggtattgtgcccgcaaagagcgtgtgtggcccggtatactgcttcactcccagccctgtggtggtgggaacgaccgacaggttgggcgtccctacctacaactggggtgacaatgacacggacgtcttcgtccttaacaacaccaggcaccgctgggcaattggtttggttgcacctggatgaactcaactggattcaccaaagtgtgcggagcgcccccttgctccatcggaggggtgggcaacaacaccttgctctgccccactgattgttttcgcaagcatccggaagccacatactcccggtgcggctccggtccctggatcacacccaggtgcttagtcaactacccttacaggctttggcctatccttgtaccgtcaactacaccatattcaaggtcaggatgtacgtgggaggggtcgagcacaggctggaagctgcttgcaactggacgcgaggcgagcgttgcgatctagaagacagggacaggtccgagctcagcccgctgctgctgtccaccacacagtggcaggtccttccgtgttccttcacgaccctgccagccttgtccaccggcctcaccacctccaccaaaacattgtggacgtgcagtacttgtacggggtggggtcgagcattgtgtcctgggccgttaagtgggagtacgtcgttctcctattccttctgcttgcggacgcgcgcgtctgctcctgcttgtggatgatgttactcatatcccaagcggaggcagctttggagaacctcgtgatactcaatgcagcatccctggccgggacgctggacttgtgcccttccttgtgttcttctgctttgcatggtatttgaagggtaagtgggtgcccggagcggcctacgtcctctacggaatgtggcctctcttcctgctcctgttagcgttgccccagcgggcatacgcgctggactcagaggcggccgcgtcgtgtggaggcgctgttcttgtcgggttgatggcgctcactctgtcaccatatttcagcactatatcagctggtgcttgtggtggcttcagtattttctgaccagagcagaggcgcaattgcacatgtgggttccccccctcaacgttcgaggggggcgtgatgccatcatcttactcacgtgtgttgtacacccggccttgatattcgacatcaccaaactgctgcttgccgtcttcggtcccctctgggttcttcaggccagtttgcttaaaggccctactttgtgcgcgttcaaggcctcctccggatctgtgcgctagtgcggaagatggccggaggccattacgtgcaaatggccatcatcaagttgggggcgcttactggcacctacatctacaaccatctcactcctcttcgggactgggcgcacaacggcctgcgagatctggccgtggctgtagagccagtcgtcttctcccaaatggagaccagctcatcacgtggggggcagacaccgccgcgtgcggtgacatcatcaacaacctgcccgtctccgcccgcaggggccaggagatactgctcggaccagccgatggaatggtttccaaggggtggagattgctagcgcccatcacggcgtacgcccagcagacaaggggcctcctagggtgtataatcaccagcctgaccggccgggacaaaaaccaagggagggtgaagtccagattgtgtcaactgctgcccaaaccttcctggcaacgtgcatcaatggggtatgctggactgtttaccacggggccggaacgaggaccatcgcatcacccaagggtcctgttatccagatgtataccaacgtagaccaggacctcgtgggctggcccgcccctcaaggtgcccgctcattgacaccctgcacctgcggctcctggacctttacctggttacgaggcacgccgatgtcattcccgtgcgccggcggggtgatagcaggggcagcctgctttcgcccaggcctatctcttacttgaagggctcctcggggggtccgctgttgtgccccgcgggacacgctgtcggcatattcagggccgcggtgtgtacccgtggagtggctaaagcggtggactttatccccgtggagaaccagagacaaccatgaggtccccggtgttcacggacaactcctctccgccagcagtgccccagagtttccaggtggcccacttgcatgctcccaccggcagcggtaagagcaccaaggtcccggctgcatacgcagcccagggctacaaggtgctagtgctcaacccctctgttgctgcaactcttggctttggtgcttatatgtccaaggcccatggggcgaccctaacatcaggaccggggtgaggacaatcactactggcagccccatcacgtactcaacctacggcaagtttcttgccgatggcgggtgctcggggggtgcctatgacataataatctgtgacgagtgccactccacggatgccacatccatcttgggcatcggcactgtccttgaccaagcagagactgcgggggcgagactggtcgtgctcgcaccgctacccctccgggctctgtcactgtgccccatcctaacatcgaggaggttgctctgtccaccaccggagagatccctttctatggcaaggctatcccccttgaggtaatcaagggggggagacatctcatcttctgccattcaaagaagaagtgcgacgagctcgccgcaaagctggtcgcattaggcatcaatgccgtggcctactaccgcgtctcgacgtgtccgtcatcccgaccagcggtgatgttgtcgtcgtggcaaccgacgccctcatgactggctttaccggcgacttcgactcggtgatagactgcaacacgtgtgtcacccagatagtcgacttcagccttgaccctacttttacaattgagacaaccacgcttccccaggatgctgtctcccgcactcagcgtcggggcaggactggcaggggaagcctggcatctatagatttgtggcaccgggggaacgcccctccggcatgttcgactcgtccgtcctctgtgagtgctatgacgcgggctgcgcttggtatgagctcacgcccgccgagactacagttaggctacgagcgtacatgaacaccccggggcttcccgtgtgccaggaccatcttgagttttgggagggcgtctttacgggccttaccatatagatgcccatttcctatcccagacaaagcagagcggggaaaactttccttacctggtagcgtaccaagccaccgtgtgcgctagggctcaagcccctcccccatcgtgggaccagatgtggaagtgcctgatccgcctcaaacccactctccatggaccaacacctctgctatacagactgggcgctgttcagaatgaagtcaccctgacgccccaatcaccaagtacatcatgacatgcatgtcggccgacctggaggtc

SEQ ID NO: 735 - DNA, 4536 bp, Hepatitis C virus
ataccgctcgtcggcgcccctcttggaggcgctgccagagccctggcgcatggcgtccgggttctggaagacggcgtgaattatgcaacagggaaccttcctggttgctctttctctatcttccttcggccctgctctcttgtctgaccgtgcccgcttcagcctaccaagtgcgcaactccacggggctttaccatgtcaccaatgattgccccaactcgagtattgtgtacgaggcggacgacaccattctgcacactccggggtgcgtcccttgcgttcgcgagggtaacgcctcgaggtgttgggtggcgatgtcccccacggtggccaccagggacggcagctccccacaacgcagcttcgacgacacatcgatctgtttgttgggggcgccaccctctgctcggccctctacgtgggggacttgtgcgggtctgtctttcttgtcggtcaactgttcaccttctctcccaggcgccactggacgacgcaggactgcaattgttctatctatcccggccatataaccggccaccgcatggcatgggatatgatgatgactggtcccctacggcggcgttggtaacggctcagctgcttcggatcccacaagccatcgtggacatgatcgctggtgctcactggggagtcctagcgggcatagcgtatttctccatggtggggaactgggcgaaagtcctggtagtgctgctgctgtttgctggcgtcgacgcgaccacctacaccaccgggggagcagccgcttccgccgcgtttaggtcgcaagtttctttaacccgggccctaagcagaacatccagctgatcaacaccaacggcagttggcacatcaacagaacggccctgaactgtaatgaaagcctcaacgccggctggttagcagggctcatttactaccaaaaattcaactcttcaggctgtcccgagagaatggccagctgccgacccctcaccgattttgaccagggctggggcctatcagttacaccaatgggagtggccccgaccaccgcccttactgctggcactaccccccaaaaccttgtggtattgtgcccgcaaagagcgtgtgtggcccggtatactgcttcactcccagccctgtggtggtgggaacgaccgacaggttgggcgtgcctacctacaactggggtgacaatgacacggacgtcttcgtccttaacaacaccaggcaccgctgggcaattggttcggttgcacctggatgaactcaactggattcaccaaagtgtgcggagcgcccccttgctccatcggaggggtgggcaacaacaccttgctctgccccactgactgttttcgcaagcatccggaagccacatactctcggtgcggctccggtccctggatcacacccaggtgcttagtcaactacccttataggctttggcctatccttgtaccgtcaactacaccatattcaaggttaggatgtacgtgggaggggtcgagcacaggctggaagctgcttgcaactggacgcgaggcgagcgttgcgatctagaagacagggacaggtccgagctcagccctctgctgctgtccaccacacagtggcaggtccttccgtgttccttcacgaccctgccagccttgtccaccggcctcaccacctccaccaaaacattgtggacgtgcagtacttgtacggggtggggtcgagcattgtgtcctgggccgttaagtgggagtacgtcgttctcctattccttctgcttgcggacgcgcgcgtctgctcctgcttgtggatgatgttactcatatcccaagcggaggcagctttggagaacctcgtaatactcaatgcagcatccctggccgggacgccggacttgtgcccttcctcgtgttcttctgctttgcatggtatttgaagggtaagtgggtgcccggagcagcctacgtcctctacggaatgtggcctctcctcctgctcctgttagcgttgccccagcgggcatacgcgctggactcagaggcggccgcgtcgtgtggaggcgctgttcttgtcgggttgatggcgctcactctgtcaccatatttcagcactatatcagctggtgcttgtggtggcttcagtattttctgaccagagtagaggcgcaattgcacatgtgggttccccccctcaatgttcgaggggggcgtgatgccatcatcttactcacgtgtgtcgtacacccgaccttgatattcgacatcaccaaactgctgcttgccatcttcggtcccctctgggttcttcaggccagtctgcttaaagaccctactttgtgcgcgttcagggcctcctccggatctgtgcgctagtgcggaagatggccggaggccattacgtgcaaatggccatcatcaagttgggggcgctcactggcacctacatctacaaccatctcactcctcttcgggactgggcgcacaacggcctgcgagatctggccgtggctgtagagccagtcgtcttctcccaaatggagaccagctcatcacgtggggggcagacaccgctgcgtgcggtgacatcatcaacaacctgcccgtctccgcccgcaggggccaggagatactgctcggaccagccgatggaatggtctccaaggggtggagattgctagcacccatcacggcatacgcccagcagacaaggggcctcctagggtgtataatcaccagcctgaccggccgggacaaaaaccaagggagggtgaagtccagattgtgtcaactgctgcccaaaccttcctggcaacgtgcatcaatggggtatgctggactgtttaccacggggccggaacgaggaccatcgcatcacccaagggtcctgttatccagatgtataccaacgtagaccaggacctcgtgggctggcccgcccctcaaggtgcccgctcattgacaccctgcacctgcggctcctggacctttacctggttacgaggcacgccgatgtcattcccgtgcgccggcggggtgatagcaggggcagcctgctttcgcccaggcctatctcttacttgaaaggctcctcggggggtccgctgttgtgccccgcgggacacgctgtcggcatattcagggccgcggtgtgcacccgtggagtggctaaagcggtggactttatccccgtggagaacccgagacaaccatgaggtccccggtgttcacggacaactcctctccgccagcagtgccccagagtttccaggtggcccacttgcacgctcccaccggcagcggtaagagcaccaaggtcccggctgcatacgcagcccagggctacaaggtgctagtgctcaacccctctgttgccgcaactcttggctttggtgcttatatgtccaaggcccatggggcgaccctaacatcaggaccggggtgaggacaatcaccactggcagccccatcacgtactcaacctacggcaagttccttgccgatggcgggtgctcggggggtgcctatgacataataatctgtgacgagtgccactccacggatgccacatccatcttgggcatcggcactgtccttgaccaagcagagactgcgggagcgagactggtcgtgctcgcaccgctacccctccaggctctgtcactgtgccccatcctaacatcgaggaggttgctctgtccaccaccggagagatccctttctatggcaaggctatcccccttgaggtaatcaagggggggagacatctcatcttctgccattcaaagaagaagtgcgacgagctcgccgcaaagctggtcgcattgggcatcaatgccgtggcctactaccgcgtctcgacgtgtccgtcatcccgaccagcggtgatgttgtcgtcgtggcaaccgatgccctcatgactggctttaccggcgacttcgactcggtgatagactgcaacacgtgtgtcacccagacagtcgacttcagccttgaccctactttcacaattgagacaaccacgcttccccaggatgctgtctcccgcactcagcgtcggggcaggactggcaggggaagcctggcgtctatagatttgtggcaccgggggaacgcccctccggcatgttcgactcgtccgtcctctgtgagtgctatgacgcgggctgcgcttggtatgagctcacgcccgccgagactacagttaggctacgagcgtacatgaacaccccggggcttcccgtgtgccaggaccatcttgagttttgggagggcgtctttacgggccttaccatatagatgcccatttcctatcccagacaaagcagagcggggaaaactttccttacctggtagcgtaccaagccaccgtatgcgctagggctcaagcccctcccccatcgtgggaccagatgtggaagtgcctgatccgcctcaaacccactctccatggaccaacacctctgctatacagactgggcgctgttcagaatgaagtcaccctgacgccccaatcaccaagtacatcatgacatgcatgtcggccgacctggaggtc

SEQ ID NO: 736 - DNA, 4856 bp, Hepatitis C virus
gcggtcagatcgttggtggagtttacttgttgccgcgcaggggccctagattgggtgtgcgcgcgacgaggaagacttccgagcggtcgcaacctcgaggtagacgtcagcctatccccaaggcacgcggcccgagggcaggacctgggctcagcccgggtatcctaggcccctctatggcaatgagggctgcgggtgggcgggatggctcctgtctccccgcggctctcggcctagttggggccccacggacccccggcgtaggtcgcgcaatttgggtaaggtcatcgatacccttacgtgcggcttcgccgacctcatggggtacataccgctcgtcggcgccctctcggaggcgctgccagggccctggcgcatggcgtccgggtcctggaagacggcgtgaactatgcaacagggaatcttcctggttgctctttctctatcttcctcctggccctgctctcttgtctgaccgtgcccgcttcagcctaccaagtgcgcaactccacggggctctaccatgtcaccaatgattgccctaattcgagtattgtgttcgagcgcacgatgttatcctgcacactccggggtgtgtcccttgcgttcgcgagggtaacgtctcgaggtgctgggtggcgctgacccccacggtggccaccagggatggcaacctccccgcgacgcaaattcgacgtcacatcgatctgcttgtcgggagtgccaccctttgttcggccctctacgtgggggacctgtgcgggtctgtctttcttatcggcaactgtttaccttctctcccaggcgtcactggacgacgcaagactgcaactgctctatgtatcccggccacataacgggtcaccgcatggcatgggacatgatgatgaactggtctcctacgacggcgttggtagtggctcagctgctccggatcccacaagccatcttggacatgatcgctggtgctcactggggagtcctggcgggcatagcgtattctccatggtggggaactgggcgaaggttctggtagtgctgctgctatttgccggcgtcgacgcggaaacccacgtcaccgggggagctgtcgcccacgccgcgtatgggatccaggctggtctcagtaatttcttcagggcaggccccaaacagaacatccagctgatcaacaccaacaacagttggcacatcaatcgcacagccttgaactgtaagatagccttgacaccggctggatagcagggcttttctattatcacaatttcaactcttcaggctgtcccgagaggttggccagctgccgacgccttaccgattttagccagggctggggccctatcagtcatgccaacggaagcggccctgaccaacgcccctactgctggcactactccccaaaaccttgcggtgttgtgcccgcgagcaccgtgtgggcccggtatattgcttcactcccagccctgtggtggtgggaacgaccgacagacggggcgcgcccacctacaactggggtgcacgggaggaggacgtcttcgtccttaacaacaccaggccaccgctgggcaattggttcggttgcatctggatgaactcatctggattcaccaaagcttgcggagcgcctccctgcgtcatcggaggggtgggcaaaacaccttgcactgccccactgattgtttccgcaagcacccagaagctacatactctcggtgcggttctggcccctggattacacccaggtgcctggtcaactacccgtataggctttggcactatccttgtaccatcaactacaccttattcaaagtcaggatgtatgtgggaggggtcgagcacaggctggatgctgcttgcaactggacgcgggggaacgttgtgatctggaagacagggacaggtccgagcttagcccgttgttgctgtccactacacagtggcaggtccttccgtgttcattcacgaccctgccagccttgtccaccggcctcatccacctccaccagaacatcgtggacgtgcagtacctctacggggtggggtcaagcatcgtgtcctgggccatcaagtgggagtacgtcgttctcctttccttctgcttgcagatgcacgtgtctgctcctgcttgtggatgatgctactcatatcccaagcggaggcagccttagagaacctcatagtactcaatgcagcatctctggccgggacgcaaggtcttgtatctttcctcgtgttcttctgctttgcgtggtacctgaagggtaggtgggtgcccggagtggcctacgccctctacgggatgtggccctcctcctgctcctgttggcgttgccccagcgggcatacgcgttggacacggaggtggccgcgtcgtgtggcggtgctgtcctcgtcgggttaatggcgctgactctgtcaccatattacaagcactatatcagctggtgcttgtggtggcttcagtattttctgaccagagtagaagcgcagctgcacgtgtgggttccccccctcaacgttcgagggggcgtgacgccatcatcttactcatgtgtgccgtacacccgactctggtatttgacatctccaagctactgctggctgtcttcgggcccctctggattcttcaagccagtttgcttaaagtaccctactttgtgcgcgtccaaggccttctccgggtctgcgcgctagcgcggaagatggctggaggtcattacgtgcaaatggctatcatcaagttggggcgcttactggcacctatattttcaatcatctcactcctcttcgggactgggcgcacaacggcctacgtgatctggccgtggccgtagaaccagtcaccttctcccaaatggagaccaagctcatcacgtggggggcggacactgccgcctgcggtgacatcatcaacggcttgcccgtctccgcccgtaggggccgggagatattgcttgggccgccgatgggatggtctccaaggggtggaggctgctggcacccatcacggcatacgcccagcagacgaggggccttctagggtgtataatcaccagcttaactggccgggacaagaaccaagtggagggtgaggtccagattatatcaactgccactcaaactttcttggcaacgtgcatcaatggagtatgctggactgtctaccacggggccggaacaggaccatcgcatcacccaagggtcctgtcattcagatgtataccaatgtagaccaagaccttgtgggttggcccgccccttcaggtgcccgctcgttgacgccctgcacttgcggctcctcggacctttacctggtcacgaggcacgccgatgtcattcccgtgcgccggcggggtgatagcaggggcagcctgctttcgccccggcccatttcctattgaaaggctcctcggggggtccactgttgtgccccgcggggcacgccgtgggcatatttagggccgcggtgtgcacccgtggagtggctaaagcggtggacttcatccctgtggagaacctagagacaaccatgaggtccccggtgttcacggacaactcctctccaccagcagtgccccagagcttccaggtggcccacctgcatgctcccacaggagcggcaagagcaccaaggtcccggctgcgtacgcagctcagggctataaggtgctagtgctcaacccctctgttgccgcaacactgggctttggtgcctacatgtccaaggcccacgggatcgagcctaacatcaggaccggggtgagaacaattaccactggcagccccatcacgtactccacctacggtaagttccttgccgacggcgggtgctcgggggcgcttatgacataataatttgtgacgagtgccactccacggatgccacatccatcttgggcatcggcactgtccttgatcaggcagagaccgcgggggcgagactggtcgtgctcgccaccgctacccctccgggctccgtcaccgtgccccatcccaacatcgaggaggttgctctgtccaccaccggagagatccctttttacggcaaggcatccccctcgacgcaatcaagggggggaggcatctcatcttctgtcactcaaaaaagaagtgcgacgagctcgccgcaaaactggtcgcattgggcgttaatgccgtggcctactaccgcggtcttgacgtgtctgtcatcccgaccagcggcgacgttgtcgtcgtggcaaccgatgctctcatgaccggctatactggcgacttcgattcggtgatgactgtaacacgtgtgtcacccagacagtcgatttcagccttgaccctacctttaccatcgagacaaccacgcttccccaggacgctgtctcccgcactcaacgtcggggcaggactggcagggggaagccaggcatctacagatttgtggcaccgggagagcgcccctccggcatgttcgactcgtccgtcctctgtgagtgctatgacgcaggctggcttggtatgagctcacgcccgctgagactacagttaggctacgagcgtacatgaacaccccggggctccccgtgtgccaagaccatcttgaattttgggagggcgtctttacaggtctcactcacatagacgcccacttcctatcccagacaaagcagagtggggagaaccttccttacctggtagcgtaccaagccaccgtgtgcgctagggctcagcccctcccccatcgtgggaccagatgtggaaatgtttgacccgcctcaagcccactctccatggaccaacgcccctgctatacagactgggcgctgtgcagaatgaggtcaccctgacgcatccagtcaccaaatacatcatgacatgca

SEQ ID NO: 737 - DNA, 4856 bp, Hepatitis C virus
gcggtcagatcgttggtggagtttacttgttgccgcgcaggggccctagattgggtgtgcgcgcgacgaggaagacttccgagcggtcgcaacctcgaggtagacgtcagcctatccccaaggcacgcggcccgagggcaggacctggactcagcccggatatcctaggcccctctatggcaatgagggctgcgggtgggcgggatggctcctgtctccccgcggctctcggcctagttggggccccacggacccccggcgtaggtcgcgcaatttgggtaaggtcatcgatacccttacgtgcggcttcgccgacctcatggggtacataccgctcgtcggcgccctctcggaggcgctgccagggccctggcgcatggcgtccgggtcctggaagacggcgtgaactatgcaacagggaatcttcctggttgctctttctctatcttcctcctggccctgctctcttgtctgaccgtgcccgcttcagcctaccaagtgcgcaactccacggggctctaccatgtcaccaatgattgccctaattcgagtattgtgttcgagcgcacgatgttatcctgcacactccggggtgtgtcccttgcgttcgcgagggtaacgtctcgaggtgctgggtggcgctgacccccacggtggccaccagggatggcaacctccccgcgacgcaaattcgacgtcacatcgatctgcttgtcgggagtgccaccctttgttcggccctctacgtgggggacctgtgcgggtctgtctttcttatcggcaactgtttaccttctctcccaggcgtcactggacgacgcaagactgcaactgctctatgtatcccggccacataacgggtcaccgcatggcatgggacatgatgatgaactggtctcctacgacggcgttggtagtggctcagctgctccggatcccacaagccatcttggacatgatcgctggtgctcactggggagtcctggcgggcatggcgtattctccatggtggggaactgggcgaaggttctggtagtgctgctgctatttgccggcgtcgacgcggaaacccacgtcaccgggggagctgtcgcccacgccgcgtatgggatccaggctggtctcagtaatttcttcaaggcaggccccaaacagaacatccagctgatcaacaccaacaacagttggcacatcaatcgcacagccttgaactgtaagatagccttgacaccggctggatagcagggcttttctattatcacaatttcaactcttcaggctgtcccgagaggttggccagctgccgacgccttaccgattttagccagggctggggccctatcagtcatgccaacggaagcggccctgaccaacgcccctactgctggcactactccccaaaaccttgcggtgttgtgcccgcgagcaccgtgtgggcccggtatattgcttcactcccagccctgtggtggtgggaacgaccgacagacggggcgcgcccacctacaactggggtgcacgggaggaggacgtcttcgtccttaacaacaccaggccaccgctgggcaattggttcggttgcatctggatgaactcatctggattcaccaaagcttgcggagcgcctccctgcgtcatcggaggggtgggcaaaacaccttgcactgccccactgattgtttccgcaagcacccagaagctacatactctcggtgcggttctggcccctggattacacccaggtgcctggtcaactacccgtataggctttggcactatccttgtaccatcaattacaccttattcaaagtcaggatgtatgtgggaggggtcgagcacaggctggatgctgcttgcaactggacgcgggggaacgttgtgatctggaagacagggacaggtccgagcttagcccgttgttgctgtccactacacagtggcaggtccttccgtgttcattcacgaccctgccagccttgtccaccggcctcatccacctccaccagaacatcgtggacgtgcagtacctctacggggtggggtcaagcatcgtgtcctgggccatcaagtgggagtacgtcgttctcctttccttctgcttgcagatgcacgtgtctgctcctgcttgtggatgatgctactcatatcccaagcggaggcagccttagagaacctcatagtactcaatgcagcatctctggccgggacgcaaggtcttgtatctttcctcgtgtttttctgctttgcgtggtacctgaagggtaggtgggtgcccggagtggcctacgccctctacgggatgtggccctcctcctgctcctgttggcgttgccccagcgggcatacgcgttggacacggaggtggccgcgtcgtgtggcggtgctgtcctcgtcgggttaatggcgctgactctgtcaccatattacaagcactatatcagctggtgcttgtggtggcttcagtattttctgaccagagtagaagcgcagctgcacgtgtgggttccccccctcaacgttcgagggggcgtgacgccatcatcttactcatgtgtgccgtacacccgactctggtatttgacatctccaaactactgctggctgtcttcgggcccctctggattcttcaagccagtttgcttaaagtaccctactttgtgcgcgtccaaggccttctccgggtctgcgcgctagcgcggaagatggctggaggtcattacgtgcaaatggctatcatcaagttggggcgcttactggcacctatattttcaatcatctcactcctcttcgggactgggcgcacaacggcctacgtgatctggccgtggccgtagaaccagtcaccttctcccaaatggagaccaagctcatcacgtggggggcggacactgccgcctgcggtgacatcatcaacggcttgcccgtctccgcccgtaggggccgggagatattgcttgggccgccgatgggatggtctccaaggggtggaggctgctggcacccatcacggcatacgcccagcagacgaggggccttctagggtgcataatcaccagcttaactggccgggacaagaaccaagtggagggtgaggtccagattatatcaactgccactcaaactttcttggcaacgtgcatcaatggggtatgctggactgtctaccacggggccggaacaggaccatcgcatcacccaagggtcctgtcattcagatgtataccaatgtagaccaagaccttgtgggttggcccgccccttcaggtgcccgctcgttgacgccctgcacttgcggctcctcggacctttacctggtcacgaggcacgccgatgtcattcccgtgcgccggcggggtgatagcaggggcagcctgctttcgccccggcccatttcctattgaaaggctcctcggggggtccactgttgtgccccgcggggcacgccgtgggcatatttagggccgcggtgtgcacccgtggagtggctaaggcggtggacttcatccctgtggagaacctagagacaaccatgaggtccccggtgttcacggacaactcctctccaccagcagtgccccagagcttccaggtggcccacctgcatgctcccacaggagcggcaagagcaccaaggtcccggctgcgtacgcagctcagggctataaggtgctagtgctcaacccctctgttgccgcaacgctgggctttggtgcctacatgtccaaggcccacgggatcgagcctaacatcaggaccggggtgagaacaattaccactggcagccccatcacgtactccacctacggtaagttccttgccgacggcgggtgctcgggggcgcttatgacataataatttgtgacgagtgccactccacggatgccacatccatcttgggcatcggcactgtccttgatcaggcagagaccgcgggggcgagactggtcgtgctcgccaccgctacccctccgggctccgtcaccgtgccccatcccaacatcgaggaggttgctctgtccaccaccggagagatccctttttacggcaaggcatccccctcgacgcaatcaagggggggaggcatctcatcttctgtcactcaaaaaagaagtgcgacgagctcgccgcaaaactggtcgcattgggcgttaatgccgtggcctactaccgcggtcttgacgtgtctgtcatcccgaccagcggcgacgttgtcgtcgtggcaaccgatgctctcatgaccggctatactggcgacttcgattcggtgatgactgtaacacgtgtgtcacccagacagtcgatttcagccttgaccctacctttaccatcgagacaaccacgcttccccaggacgctgtctcccgcactcaacgtcggggcaggactggcagggggaagccaggcatctacagatttgtggcaccgggagagcgcccctccggcatgttcgactcgtccgtcctctgtgagtgctatgacgcaggctggcttggtatgagctcacgcccgctgagactacagttaggctacgagcgtacatgaacaccccggggctccccgtgtgccaagaccatcttgaattttgggagggcgtctttacaggtctcactcacatagacgcccacttcctatcccagacaaagcagagtggggagaaccttccttacctggtagcgtaccaagccaccgtgtgcgctagggctcagcccctcccccatcgtgggaccagatgtggaaatgtttgacccgcctcaagcccactctccatggaccaacgcccctgctatacagactgggcgctgtgcagaatgaggtcaccctgacgcatccagtcaccaaatacatcatgacatgca

SEQ ID NO: 738 - DNA, 4856 bp, Hepatitis C virus
gcggtcagatcgttggtggagtttacttgttgccgcgcaggggccctagattgggtgtgcgcgcgacgaggaagacttccgagcggtcgcaacctcgaggtagacgtcagcctatccccaaggcacgcggcccgagggcaggacctggactcagcccggatatcctaggcccctctatggcaatgagggctgcgggtgggcgggatggctcctgtctccccgcggctctcggcctagttggggccccacggacccccggcgtaggtcgcgcaatttgggtaaggtcatcgatacccttacgtgcggcttcgccgacctcatggggtacataccgctcgtcggcgccctctcggaggcgctgccagggccctggcgcatggcgtccgggtcctggaagacggcgtgaactatgcaacagggaatcttcctggttgctctttctctatcttcctcctggccctgctctcttgtctgaccgtgcccgcttcagcctaccaagtgcgcaactccacggggctctaccatgtcaccaatgattgccctaattcgagtattgtgttcgagcgcacgatgttatcctgcacactccggggtgtgtcccttgcgttcgcgagggtaacgtctcgaggtgctgggtggcgctgacccccacggtggccaccagggatggcaacctccccgcgacgcaaattcgacgtcacatcgatctgcttgtcgggagtgccaccctttgttcggccctctacgtgggggacctgtgcgggtctgtctttcttatcggcaactgtttaccttctctcccaggcgtcactggacgacgcaagactgcaactgctctatgtatcccggccacataacgggtcaccgcatggcatgggacatgatgatgaactggtctcctacgacggcgttggtagtggctcagctgctccggatcccacaagccatcttggacatgatcgctggtgctcactggggagtcctggcgggcatggcgtattctccatggtggggaactgggcgaaggttctggtagtgctgctgctgtttgccggcgtcgacgcggaaacccacgtcaccgggggagctgtcgcccacgccgcgtatgggatccaggctggtctcagtaatttcttcaaggcaggccccaaacagaacatccagctgatcaacaccaacaacagttggcacatcaatcgcacagccttgaactgtaagatagccttgacaccggctggatagcagggcttttctattatcacaatttcaactcttcaggctgtcccgagaggttggccagctgccgacgccttaccgattttagccagggctggggccctatcagtcatgccaacggaagcggccctgaccaacgcccctactgctggcactactccccaaaaccttgcggtgttgtgcccgcgagcaccgtgtgggcccggtatattgcttcactcccagccctgtggtggtgggaacgaccgacagacggggcgcgcccacctacaactggggtgcacgggaggaggacgtcttcgtccttaacaacaccaggccaccgctgggcaattggttcggttgcatctggatgaactcatctggattcaccaaagcttgcggagcgcctccctgcgtcatcggaggggtgggcaaaacaccttgcactgccccacagattgtttccgcaagcacccagaagctacatactctcggtgcggttctggcccctggattacacccaggtgcctggtcaactacccgtataggctttggcactatccttgtaccatcaactacaccttattcaaagtcaggatgtatgtgggaggggtcgagcacaggctggatgctgcttgcaactggacgcgggggaacgttgtgatctggaagacagggacaggtccgagcttagcccgttgttactgtccactacacagtggcaggtccttccgtgttcattcacgaccctgccagccttgtccaccggcctcatccacctccaccagaacatcgtggacgtgcagtacctctacggggtggggtcaagcatcgtgtcctgggccatcaagtgggagtacgtcgttctcctttccttctgcttgcagatgcacgtgtctgctcctgcttgtggatgatgttactcatatcccaagcggaggcagccttagagaacctcatagtactcaatgcagcatctctggccgggacgcaaggtcttgtatctttcctcgtgttcttctgctttgcgtggtacctgaagggtaggtgggtgcccggagtggcctacgccctctacgggatgtggccctcctcctgctcctgttggcgttgccccagcgggcatacgcgttggacacggaggtggccgcgtcgtgtggcggtgctgtcctcgtcgggttaatggcgctgactctgtcaccatattacaagcactatatcagctggtgcttgtggtggcttcagtattttctgaccagagtagaagcgcagctgcacgtgtgggttccccccctcaacgttcgagggggcgtgacgccatcatcttactcatgtgtgccgtacacccgactctggtatttgacatctccaaactactgctggctgtcttcgggcccctctggattcttcaagccagtttgcttaaagtaccctactttgtgcgcgtccaaggccttctccgggtctgcgcgctagcgcggaagatggctggaggtcattacgtgcaaatggctatcatcaagttggggcgcttactggcacctatattttcaatcatctcactcctcttcgggactgggcgcacaacggcctacgtgatctggccgtggccgtagaaccagtcaccttctcccaaatggagaccaagctcatcacgtggggggcggacactgccgcctgcggtgacatcatcaacggcttgcccgtctccgcccgtaggggccgggagatattgcttgggccgccgatgggatggtctccaaggggtggaggctgctggcacccatcacggcatacgcccagcagacgaggggccttctagggtgtataatcaccagcttaactggccgggacaagaaccaagtggagggtgaggtccagattatatcaactgccactcaaactttcttggcaacgtgcatcaatggggtatgctggactgtctaccacggggccggaacaggaccatcgcatcacccaagggtcctgttattcagatgtataccaatgtagaccaagaccttgtgggttggcccgccccttcaggtgcccgctcgttgacgccctgcacttgcggctcctcggacctttacctggtcacgaggcacgccgatgtcattcccgtgcgccggcggggtgatagcaggggcagcctgctttcgccccggcccatttcctattgaaaggctcctcagggggtccactgttgtgccccgcggggcacgccgtgggcatatttagggccgcggtgtgcacccgtggagtggctaaggcggtggacttcatccctgtggagaacctagagacaaccatgaggtccccggtgttcacggacaactcctctccaccagcagtgccccagagcttccaggtggcccacctgcatgctcccacaggagcggcaagagcaccaaggtcccggctgcgtacgcagctcagggctataaggtgctagtgctcaacccctctgttgccgcaacactgggctttggtgcctacatgtccaaggcccacgggatcgagcctaacatcaggaccggggtgagaacaattaccactggcagccccatcacgtactccacctacggtaagttccttgccgacggcgggtgctcgggggcgcttatgacataataatttgtgacgagtgccactccacggatgccacatccatcttgggcatcggcactgtccttgatcaggcagagaccgcgggggcgagactggtcgtgctcgccaccgctacccctccgggctccgtcaccgtgccccatcccaacatcgaggaggttgctctgtccaccaccggagagatccctttttacggcaaggcatccccctcgacgcaatcaagggggggaggcatctcatcttctgtcactcaaaaaagaagtgcgacgagctcgccgcaaaactggtcgcattgggcgttaatgccgtggcctactaccgcggtcttgacgtgtctgtcatcccgaccagcggcgacgttgtcgtcgtggcaaccgatgctctcatgaccggctatactggcgacttcgattcggtgatgactgtaacacgtgtgtcacccagacagtcgatttcagccttgaccctacctttaccatcgagacaaccacgcttccccaggacgctgtctcccgcactcaacgtcggggcaggactggcagggggaagccaggcatctacagatttgtggcaccgggagagcgcccctccggcatgttcgactcgtccgtcctctgtgagtgctatgacgcaggctggcttggtatgagctcacgcccgctgagactacagttaggctacgagcgtacatgaacaccccggggctccccgtgtgccaagaccatcttgaattttgggagggcgtctttacaggcctcactcacatagacgcccacttcctatcccagacaaagcagagtggggagaaccttccttacctggtagcgtaccaagccaccgtgtgcgctagggctcagcccctcccccatcgtgggaccagatgtggaaatgtttgacccgcctcaagcccactctccatggaccaacgcccctgctatacagactgggcgctgtgcagaatgaggtcaccctgacgcatccagtcaccaaatacatcatgacatgca

SEQ ID NO: 739 - DNA, 4856 bp, Hepatitis C virus
gcggtcagatcgttggtggagtttacttgttgccgcgcaggggccctagattgggtgtgcgcgcgacgaggaagacttccgagcggtcgcaacctcgaggtagacgtcagcctatccccaaggcacgcggcccgagggcaggacctggactcagcccggatatcctaggcccctctatggcaatgagggctgcgggtgggcgggatggcttctgtctccccgcggctctcggcctagttggggccccacggacccccggcgtaggtcgcgcaacttgggtaaggtcatcgatacccttacgtgcggcttcgccgacctcatggggtacataccgctcgtcggcgccctctcggaggcgctgccagggccctggcgcatggcgtccgggtcctggaagacggcgtgaactatgcaacagggaatcttcctggttgctctttctctatcttcctcctggccctgctctcttgtctgaccgtgcccgcttcagcctaccaagtgcgcaactccacggggctctaccatgtcaccaatgattgccctaattcgagtattgtgttcgagcgcacgatgttatcctgcacactccggggtgtgtcccttgcgttcgcgagggtaacgtctcgaggtgctgggtggcgctgacccccacggtggccaccagggatggcaacctccccgcgacgcaaattcgacgtcacatcgatctgcttgtcgggagtgccaccctttgttcggccctctacgtgggggacctgtgcgggtctgtctttcttatcggcaactgtttaccttctctcccaggcgtcactggacgacgcaagactgcaactgctctatgtatcccggccacataacgggtcaccgcatggcatgggacatgatgatgaactggtctcctacgacggcgttggtagtggctcagctgctccggatcccacaagccatcttggacatgatcgctggtgctcactggggagtcctggcgggcatggcgtattctccatggtggggaactgggcgaaggttctggtagtgctgctgctatttgccggcgtcgacgcggaaacccacgtcaccgggggagctgtcgcccacgccgcgtatgggatccaggctggtctcagtaatttcttcaaggcaggccccaaacagaacatccagctgatcaacaccaacaacagttggcacatcaatcgcacagccttgaactgtaagatagccttgacaccggctggatagcagggcttttctattatcacaatttcaactcttcaggctgtcccgagaggttggccagctgccgacgccttaccgattttagccagggctggggccctatcagtcatgccaacggaagcggccctgaccaacgcccctactgctggcactactccccaaaaccttgcggtgttgtgcccgcgagcaccgtgtgggcccggtatattgcttcactcccagccctgtggtggtggggacgaccgacagacggggcgcgcccacctacaactggggtacacgggagggggacgtcttcgtccttaacaacaccaggccaccgctgggcaattggttcggttgcatctggatgaactcatctggattcaccaaagcttgcggagcgcctccctgcgtcatcggaggggtgggcaaaacaccttgcactgccccactgattgtttccgcaagcacccagaagctacatactctcggtgcggttctggcccctggattacacccaggtgcctggtcaactacccgtataggctttggcactatccttgtaccatcaactacaccttattcaaagtcaggatgtatgtgggaggggtcgagcacaggctggatgctgcttgcaactggacgcgggggaacgttgtgatctggaagacggggacaggtccgagcttagcccgttgttgctgtccactacacagtggcaggtccttccgtgttcattcacgaccctgccagccttgtccaccggcctcatccacctccaccagaacatcgtggacgtgcagtacctctacggggtggggtcaagcatcgtgtcctgggccatcaagtgggagtacgtcgttctcctttccttctgcttgcagatgcacgtgtctgctcctgcttgtggatgatgctactcatatcccaagcggaggcagccttagagaaccttatagtactcaatgcagcatctctggccgggacgcaaggtcttgtatctttcctcgtgttcttctgctttgcgtggtacctgaagggtaggtgggtgcccggagtggcctacgccctctacgggatgtggccctcctcctgctcctgttggcgttgccccagcgggcatacgcgttggacacggaggtggccgcgtcgtgtggcggtgctgtcctcgtcgggttaatggcgctgactctgtcaccatattacaagcactatatcagctggtgcttgtggtggcttcagtattttctgaccagagtagaagcgcagctgcacgtgtgggttccccccctcaacgttcgagggggcgtgacgccatcatcttactcatgtgtgccgtacacccgactctggtatttgacatctccaaactactgctggctgtcttcgggcccctctggattcttcaagccagtttgcttaaagtaccctactttgtgcgcgtccaaggccttctccgggtctgcgcgctagcgcggaagatggctggaggtcattacgtgcaaatggctatcatcaagttggggcgcttactggcacctatattttcaatcatctcactcctcttcgggactgggcgcacaacggcctacgtgatctggccgtggccgtagaaccagtcaccttctcccaaatggagaccaagctcatcacgtggggggcggacactgccgcctgcggtgacatcatcaacggcttgcccgtctccgcccgtaggggccgggagatattgcttgggccgccgatgggatggtctccaaggggtggaggctgctggcacccatcacggcatacgcccagcagacgaggggccttctagggtgtataatcaccagcttaactggccgggacaagaaccaagtggagggtgaggtccagattatatcaactgccactcaaactttcttggcaacgtgcatcaatggggtatgctggactgtctaccacggggccggaacaggaccatcgcatcacccaagggtcctgttattcagatgtataccaatgtagaccaagaccttgtgggttggcccgccccttcaggtgcccgctcgttgacgccctgcacttgcggctcctcggacctttacctggtcacgaggcacgccgatgtcattcccgtgcgccggcggggtgatagcaggggcagcctgctttcgccccggcccatttcctattgaaaggctcctcggggggtccactgttgtgccccgcggggcacgccgtgggcatatttagggccgcggtgtgcacccgtggagtggctaaggcggtggacttcatccctgtggagaacctagagacaaccatgaggtccccggtgttcacggacaactcctctccaccagcagtgccccagagcttccaggtggcccacctgcatgctcccacaggagcggcaagagcaccaaggtcccggctgcgtacgcagctcagggctataaggtgctagtgctcaacccctctgttgccgcaacactgggctttggtgcctacatgtccaaggcccacgggatcgagcctaacatcaggaccggggtgagaacaattaccactggcagccccatcacgtactccacctacggtaagttccttgccgacggcgggtgctcgggggcgcttatgacataataatttgtgacgagtgccactccacggatgccacatccatcttgggcatcggcactgtccttgatcaggcagagaccgcgggggcgagattggtcgtgctcgccaccgctacccctccgggctccgtcaccgtgccccatcccaacatcgaggaggttgctctgtccaccaccggagagatccctttttacggcaaggcatccccctcgacgcaatcaagggggggaggcatctcatcttctgtcactcaaaaaaaaagtgcgacgagctcgccgcaaaactggtcgcattgggcgttaatgccgtggcctactaccgcggtcttgacgtgtctgtcatcccgaccagcggcgacgttgtcgtcgtggcaaccgatgctctcatgaccggctatactggcgacttcgattcggtgatgactgtaacacgtgtgtcacccagacagtcgatttcagccttgaccctacctttaccatcgagacaaccacgcttccccaggacgctgtctcccgcactcaacgtcggggcaggactggcagggggaagccaggcatctacagatttgtggcaccgggagagcgcccctccggcatgttcgactcgtccgtcctctgtgagtgctatgacgcaggctggcttggtatgagctcacgcccgctgagactacagttaggctacgagcgtacatgaacaccccggggctccccgtgtgccaagaccatcttgaattttgggagggcgtctttacaggtctcactcacatagacgcccacttcctatcccagacaaagcagagtggggagaaccttccttacctggtagcgtaccaagccaccgtgtgcgctagggctcagcccctcccccatcgtgggaccagatgtggaaatgtttgacccgcctcaagcccactctccatggaccaacgcccctgctatacagactgggcgctgtgcagaatgaggtcaccctgacgcatccagtcaccaaatacatcatgacatgca

SEQ ID NO: 740 - DNA, 4856 bp, Hepatitis C virus
gcggtcagatcgttggtggagtttacttgttgccgcgcaggggccctagattgggtgtgcgcgcgacgaggaagacttccgagcggtcgcaacctcgaggtagacgtcagcctatccccaaggcacgcggcccgagggcaggacctgggctcagcccgggtatcctaggcccctctatggcaatgagggctgcgggtgggcgggatggctcctgtctccccgcggctctcggcctagttggggccccacggacccccggcgtaggtcgcgcaatttgggtaaggtcatcgatacccttacgtgcggcttcgccgacctcatggggtacataccgctcgtcggcgccctctcggaggcgctgccagggccctggcgcatggcgtccgggtcctggaagacggcgtgaactatgcaacagggaatcttcctggttgctctttctctatcttcctcctggccctgctctcttgtctgaccgtgcccgcttcagcctaccaagtgcgcaactccacggggctctaccatgtcaccaatgattgccctaattcgagtattgtgttcgagcgcacgatgttatcctgcacactccggggtgtgtcccttgcgttcgcgagggtaacgtctcgaggtgctgggtggcgctgactcccacggtggccaccagggatggcaacctccccgcgacgcaaattcgacgtcacatcgatctgcttgtcgggagtgccaccctttgttcggccctctacgtgggggacctgtgcgggtctgtctttcttatcggcaactgtttaccttctctcccaggcgtcactggacgacgcaagactgcaattgctctatgtatcccggccacataacgggtcaccgcatggcatgggacatgatgatgaactggtctcctacgacggcgttggtagtggctcagctgctccggatcccacaagccatcttggacatgatcgctggtgctcactggggagtcctggcgggcatagcgtattctccatggtggggaactgggcgaaggttctggtagtgctgctgctatttgccggcgtcgacgcggaaacccacgtcaccgggggagctgtcgcccacgccgcgtatgggatccaggctggtctcagtaatttcttcaggccaggccccaaacagaacatccagctgatcaacaccaacaacagttggcacatcaatcgcacggccttgaactgtaagacagccttgacaccggctggatagcagggcttttctattatcacaatttcaactcttcaggctgtcccgagaggttggccagctgccgacgccttaccgattttggccagggctggggccctatcagttatgccaacggaagcggccctgaccaacgcccctattgctggcactactccccaaaaccttgcggtgttgtgcccgcgagcaccgtgtgggcccggtatattgcttcactcccagccctgtggtggtgggaacgaccgacagacggggcgcgcccacctacaactggggtgcacgggaggaggacgtcttcgtccttaacaacaccaggccaccgctgggcaattggttcggttgcatctggatgaactcatctggattcaccaaagcttgcggagcgcctccctgcgtcatcggaggggtgggcaaaacaccttgcactgccccactgattgtttccgcaagcacccggaagctacatactctcggtgcggctctggcccctggattacacccaggtgcttggtcaactacccgtataggctttggcattatccttgtaccatcaactacaccttattcaaagtcaggatgtatgtgggaggggtcgaacacaggctggatgctgcttgcaactggacgcgggggaacgttgtgatctggaagacagggacaggtccgagcttagcccgttgttgctgtccactacacagtggcaggtccttccgtgttcattcacgaccctgccagccttgtccaccggcctcatccacctccaccagaacatcgtggacgtgcagtacctctacggggtggggtcaagcatcgtgtcctgggccattaagtgggagtacgtcgttctcctttccttctgcttgcagatgcacgtgtctgctcctgcttgtggatgatgctactcatatcccaagcggaggcagccttagagaacctcatagtactcaatgtagcatctctggccgggacgcaaggtcttgtatctttcctcgtgttcttctgctttgcgtggtacctgaagggtaggtgggtgcccggagtggcctacgccctctacgggatgtggccctcctcctgctcctgttggcgttgccccagcgggcatacgcgttggacacggaggtggccgcgtcgtgtggcggtgctgtcctcgtcgggttaatggcgctgactctgtcaccatattacaagcactatatcagctggtgcttgtggtggcttcagtattttctgaccagagtagaagcgcagctgcacgtgtgggttccccccctcaacgttcgagggggcgtgacgccatcatcttactcatgtgtgccgtacacccgactctggtatttgacatctccaaactactgctggccgtcttcgggcccctctggattcttcaagccagtttgcttaaagtaccctactttgtgcgcgtccaaggccttctccgggtctgcgcgctagcgcggaagatggctggaggtcattacgtgcaaatggctatcatcaagttggggcgcttactggcacctatatttacaatcatctcactcctcttcgggactgggcgcacaacggcctacgtgatctggccgtggccgtggaaccagtcaccttctcccaaatggagaccaagcttatcacgtggggggcggacactgccgcctgcggtgacatcatcaacggcttgcccgtctccgcccgtaggggccgggagatattgcttgggccgccgacgggatggtctccaaggggtggaggctgctggcacccatcacggcatacgcccagcagacgaggggccttctagggtgcataatcaccagcttaactggccgggacaagaaccaagtggagggtgaggtccagattatatcaactgccactcaaactttcttggcaacgtgcatcaatggggtatgctggactgtctaccacggggccggaacaggaccatcgcatcacccaagggtcctgttattcagatgtataccaatgtagaccaagaccttgtgggttggcccgcccccccaggtgcccgctcgttgacgccctgcacttgcggctcctcggacctttacctggtcacgaggcacgccgatgtcattcccgtgcgccggcggggtgatagcaggggcagcctgctttcgccccggcccatttcctattgaaaggctcctcggggggtccactgttgtgccccgcggggcacgccgtgggcatatttagggccgcggtgtgcacccgtggagtggctaaggcggtggacttcatccctgtggagaacctagagacaaccatgaggtctccggtgttcacggacaactcctctccaccagcagtgccccagagcttccaggtggcccacctgcatgctcccacaggagcggcaagagcaccaaggtcccggctgcatacgcagctcagggctataaggtgctagtgcttaacccctctgttgctgcaacactgggctttggtgcctacatgtccaaggcccacgggatcgagcctaacatcaggaccggggtgagaacaattactactggcagccccatcacgtactccacctacggtaagttccttgccgacggcgggtgctcgggggcgcttatgacataataatttgtgacgagtgccactccacggatgccacatccatcttgggcatcggcactgtccttgatcaggcagagaccgcgggggcgagactggtcgtgctcgccaccgctacccctccgggctccgtcaccgtgccccatcccaacatcgaggaggttgctctgtccaccaccggagagatccctttttacggcaaggcatccccctcgacgcaatcaagggggggaggcatctcatcttctgccactcaaaaaagaagtgcgacgagctcgccgcaaaactggtcgcattgggcgttaatgccgtggcctactaccgcggtcttgacgtgtctgtcatcccgaccagcggcgacgttgtcgtcgtggcaaccgatgctctcatgaccggctatactggcgacttcgattcggtggtgactgtaacacgtgtgtcacccagacagtcgatttcagccttgaccctacctttaccattgagacaaccacgcttccccaggacgctgtctcccgcactcaacgtcggggcaggactggcagggggaagccaggcatctacagatttgtggcaccgggagagcgcccctccggcatgttcgactcgtccgtcctctgtgagtgctatgacgcaggctggcttggtatgagctcacgcccgctgagactacagttaggctacgagcgtacatgaacaccccggggctccccgtgtgccaagaccatcttgaattttgggagggcgtctttacaggtctcactcatatagacgcccacttcctatcccagacaaagcagagtggggagaaccttccttacctggtagcgtaccaagccaccgtgtgcgctagggctcagcccctcccccatcgtgggaccagatgtggaaatgtttgacccgcctcaagcccactctccatggaccaacgcccctgctatacagactgggcgctgtgcagaatgaggtcaccctgacgcatccagtcaccaaatacatcatgacatgca

SEQ ID NO: 741 - DNA, 4856 bp, Hepatitis C virus
gcggtcagatcgttggtggagtttacttgttgccgcgcaggggccctagattgggtgtgcgcgcgacgaggaagacttccgagcggtcgcaacctcgaggtagacgtcagcctatccccaaggcacgcggcccgagggcaggacctgggctcagcccgggtatcctaggcccctctatggcaatgagggctgcgggtgggcgggatggctcctgtctccccgcggctctcggcctagttggggccccacggacccccggcgtaggtcgcgcaatttgggtaaggtcatcgatacccttacgtgcggcttcgccaacctcatggggtacataccgctcgtcggcgccctctcggaggcgctgccagggccctggcgcatggcgtccgggtcctggaagacggcgtgaactatgcaacagggaatcttcctggttgctctttctctatcttcctcctggccctgctctcttgtctgaccgtgcccgcttcagcctaccaagtgcgcaactccacggggctctaccatgtcaccaatgattgccctaattcgagtattgtgttcgagcgcacgatgttatcctgcacactccggggtgtgtcccttgcgttcgcgagggtaacgtctcgaggtgctgggtggcgctgactcccacggtggccaccagggatggcaacctccccgcgacgcaaattcgacgtcacatcgatctgcttgtcgggagtgccaccctttgttcggccctctacgtgggggacctgtgcgggtctgtctttcttatcggcaactgtttaccttctctcccaggcgtcactggacgacgcaagactgcaattgctctatgtatcccggccacataacgggtcaccgcatggcatgggacatgatgatgaactggtctcctacgacggcgttggtagtggctcagctgctccggatcccacaagccatcttggacatgatcgctggtgctcactggggagtcctggcgggcatagcgtattctccatggtggggaactgggcgaaggttctggtagtgctgctgctatttgccggcgtcgacgcggaaacccacgtcaccgggggagctgtcgcccacgccgcgtatgggatccaggctggtctcagtaatttcttcaggccaggccccaaacagaacatccagctgatcaacaccaacaacagttggcacatcaatcgcacggccttgaactgtaagacagccttgacaccggctggatagcagggcttttctattatcacaatttcaactcttcaggctgtcccgagaggttggccagctgccgacgccttaccgattttggccagggctggggccctatcagttatgccaacggaagcggccctgaccaacgcccctattgctggcactactccccaaaaccttgcggtgttgtgcccgcgagcaccgtgtgggcccggtatattgcttcactcccagccctgtggtggtgggaacgaccgacagacggggcgcgcccacctacaactggggtgcacgggaggaggacgtcttcgtccttaacaacaccaggccaccgctgggcaattggttcggttgcatctggatgaactcatctggattcaccaaagcttgcggagcgcctccctgcgtcatcggaggggtgggcaaaacaccttgcactgccccactgattgtttccgcaagcacccggaagctacatactctcggtgcggctctggcccctggattacacccaggtgcttggtcaactacccgtataggctttggcattatccttgtaccatcaactacaccttattcaaagtcaggatgtatgtgggaggggtcgaacacaggctggatgctgcttgcaactggacgcgggggaacgttgtgatctggaagacagggacaggtccgagcttagcccgttgttgctgtccactacacagtggcaggtccttccgtgttcattcacgaccctgccagccttgtccaccggcctcatccacctccaccagaacatcgtggacgtgcagtacctctacggggtggggtcaagcatcgtgtcctgggccattaagtgggagtacgtcgttctcctttccttctgcttgcagatgcacgtgtctgctcctgcttgtggatgatgctactcatatcccaagcggaggcagccttagagaacctcatagtactcaatgcagcatctctggccgggacgcaaggtcttgtatctttcctcgtgttcttctgctttgcgtggtacctgaagggtaggtgggtgcccggagtggcctacgccctctacgggatgtggccctcctcctgctcctgttggcgttgccccagcgggcatacgcgttggacacggaggtggccgcgtcgtgtggcggtgctgtcctcgtcgggttaatggcgctgactctgtcaccatattacaagcactatatcagctggtgcttgtggtggcttcagtattttctgaccagagtagaagcgcagctgcacgtgtgggttccccccctcaacgttcgagggggcgtgacgccatcatcttactcatgtgtgccgtacacccgactctggtatttgacatctccaaactactgctggccgtcttcgggcccctctggattcttcaagccagtttgcttaaagtaccctactttgtgcgcgtccaaggccttctccgggtctgcgcgctagcgcggaagatggctggaggtcattacgtgcaaatggctatcatcaagttggggcgcttactggcacctatatttacaatcatctcactcctcttcgggactgggcgcacaacggcctacgtgatctggccgtggccgtggaaccagtcaccttctcccaaatggagaccaagcttatcacgtggggggcggacactgccgcctgcggtgacatcatcaacggcttgcccgtctccgcccgtaggggccgggagatattgcttgggccgccgacgggatggtctccaaggggtggaggctgctggcacccatcacggcatacgcccagcagacgaggggccttctagggtgcataatcaccagcttaactggccgggacaagaaccaagtggagggtgaggtccagattatatcaactgccactcaaactttcttggcaacgtgcatcaatggggtatgctggactgtctaccacggggccggaacaggaccatcgcatcacccaagggtcctgttattcagatgtataccaatgtagaccaagaccttgtgggttggcccgcccccccaggggcccgctcgttgacgccctgcacttgcggttcctcggacctttacctggtcacgaggcacgccgatgtcattcccgtgcgccggcggggtgatagcaggggcagcctgctttcgccccggcccatttcctattgaaaggctcctcggggggtccactgttgtgccccgcggggcacgccgtgggcatatttagggccgcggtgtgcacccgtggagtggctaaggcggtggacttcatccctgtggagaacctagagacaaccatgaggtctccggtgttcacggacaactcctctccaccagcagtgccccagagcttccaggtggcccacctgcatgctcccacaggagcggcaagagcaccaaggtcccggctgcatacgcagctcagggctataaggtgctagtgcttaacccctctgttgctgcaacactgggctttggtgcctacatgtccaaggcccacgggatcgagcctaacatcaggaccggggtgagaacaattaccactggcagccccatcacgtactccacctacggtaagttccttgccgacggcgggtgctcgggggcgcttatgacataataatttgtgacgagtgccactccacggatgccacatccatcttgggcatcggcactgtccttgatcaggcagagaccgcgggggcgagactggtcgtgctcgccaccgctacccctccgggctccgtcaccgtgccccatcccaacatcgaggaggttgctctgtccaccaccggagagatccctttttacggcaaggcatccccctcgacgcaatcaagggggggaggcatctcatcttctgccactcaaaaaagaagtgcgacgagctcgccgcaaaactggtcgcattgggcgttaatgccgtggcctactaccgcggtcttgacgtgtctgtcatcccgaccagcggcgacgttgtcgtcgtggcaaccgatgctctcatgaccggctatactggcgacttcgattcggtggtgactgtaacacgtgtgtcacccagacagtcgatttcagccttgaccctacctttaccattgagacaaccacgcttccccaggacgctgtctcccgcactcaacgtcggggcaggactggcagggggaagccaggcatctacagatttgtggcaccgggagagcgcccctccggcatgttcgactcgtccgtcctctgtgagtgctatgacgcaggctggcttggtatgagctcacgcccgctgagactacagttaggctacgagcgtacatgaacaccccggggctccccgtgtgccaagaccatcttgaattttgggagggcgtctttacaggtctcactcatatagacgcccacttcctatcccagacaaagcagagtggggagaaccttccttacctggtagcgtaccaagccaccgtgtgcgctagggctcagcccctcccccatcgtgggaccagatgtggaaatgtttgacccgcctcaagcccactctccatggaccaacgcccctgctatacagactgggcgctgtgcagaatgaggtcaccctgacgcatccagtcaccaaatacatcatgacatgca

SEQ ID NO: 742 - DNA, 4856 bp, Hepatitis C virus
gcggtcagatcgttggtggagtttacttgttgccgcgcaggggccctagattgggtgtgcgcgcgacgaggaagacttccgagcggtcgcaacctcgaggtagacgtcagcctatccccaaggcacgcggcccgagggcaggacctgggctcagcccgggtatcctaggcccctctatggcaatgagggctgcgggtgggcgggatggctcctgtctccccgcggctctcggcctagttggggccccacggacccccggcgtaggtcgcgcaatttgggtaaggtcatcgatacccttacgtgcggcttcgccgacctcatggggtacataccgctcgtcggcgccctctcggaggcgctgccagggccctggcgcatggcgtccgggtcctggaagacggcgtgaactatgcaacagggaatcttcctggttgctctttctctatcttcctcctggccctgctctcttgtctgaccgtgcccgcttcagcctaccaagtgcgcaactccacggggctctaccatgtcaccaatgattgccctaattcgagtattgtgttcgagcgcacgatgttatcctgcacactccggggtgtgtcccttgcgttcgcgagggtaacgtctcgaggtgctgggtggcgctgacccccacggtggccaccagggatggcaacctccccgcgacgcaaattcgacgtcacatcgatctgcttgtcgggagtgccaccctttgttcggccctctacgtgggggacctgtgcgggtctgtctttcttatcggcaactgtttaccttctctcccaggcgtcactggacgacgcaagactgcaactgctctatgtatcccggccacataacgggtcaccgcatggcatgggacatgatgatgaactggtctcctacgacggcgttggtagtggctcagctgctccggatcccacaagccatcttggacatgatcgctggtgctcactggggagtcctggcgggcatagcgtattctccatggtggggaactgggcgaaggttctggtagtgctgctgctatttgccggcgtcgacgcggaaacccacgtcaccgggggagctgtcgcccacgccgcgtatgggatccaggctggtctcagtaatttcttcaggccaggccccaaacagaacatccagctgatcaacaccaacaacagttggcacatcaatcgcacggccttgaactgtaagacagccttgacaccggctggatagcagggcttttctattatcacaatttcaactcttcaggctgtcccgagaggttggccagctgccgacgccttaccgattttggccagggctggggccctatcagttatgccaacggaagcggccctgaccaacgcccctactgctggcactactccccaaaaccttgcggtgttgtgcccgcgagcaccgtgtgggcccggtatattgcttcactcccagccctgtggtggtgggaacgaccgacagacggggcgcgcccacctacaactggggtacacgggagggggacgtcttcgtccttaacaacaccaggccaccgctgggcaattggttcggttgcatctggatgaactcatctggattcaccaaagcttgcggagcgcctccctgcgtcatcggaggggtgggcaaaacaccttgcactgccccactgattgtttccgcaagcacccggaagctacatactctcggtgcggctctggcccctggattacacccaggtgcttggtcaactacccgtataggctttggcattatccttgtaccatcaactacaccttattcaaagtcaggatgtatgtgggaggggtcgagcacaggctggatgctgcttgcaactggacgcgggggaacgttgtgatctggaagacagggacaggtccgagcttagcccgttgttgctgtccactacacagtggcaggtccttccgtgttcattcacgaccctgccagccttgtccaccggcctcatccacctccaccagaacatcgtggacgtgcagtacctctacggggtggggtcaagcatcgtgtcctgggccatcaagtgggagtacgtcgttctcctttccttctgcttgcagatgcacgtgtctgctcctgcttgtggatgatgctactcatatcccaagcggaggcagccttagagaacctcatagtactcaatgcagcatctctggccgggacgcaaggtcttgtatctttcctcgtgttcttctgctttgcgtggtacctgaagggtaggtgggtgcccggagtggcctacgccctctacgggatgtggccctcctcctgctcctgttggcgttgccccagcgggcatacgcgttggacacggaggtggccgcgtcgtgtggcggtgctgtcctcgtcgggttaatggcgctgactctgtcaccatattacaagcactatatcagctggtgcttgtggtggcttcagtatttcctgaccagagtagaagcgcagctgcacgtgtgggttccccccctcaacgttcgagggggcgtgacgccatcatcttactcatgtgtgccgtacacccgactctggtatttgacatctccaaactactgctggccgtcttcgggcccctctggattcttcaagccagtttgcttaaagtaccctactttgtgcgcgtccaaggccttctccgggtctgcgcgctagcgcggaagatggctggaggtcattacgtgcaaatggctatcatcaagttggggcgcttactggcacctatatttacaatcatctcactcctcttcgggactgggcgcacaacggcctacgtgatctggccgtggccgtagaaccagtcaccttctcccaaatggagaccaagcttatcacgtggggggcggacactgccgcctgcggtgacatcatcaacggcttgcccgtctccgcccgtaggggccgggagatattgcttgggccgccgacgggatggtctccaaggggtggaggctgctggcacccatcacggcatacgcccagcagacgaggggccttctagggtgcataatcaccagcttaactggccgggacaagaaccaagtggagggtgaggtccagattatatcaactgccactcaaactttcttggcaacgtgcatcaatggggtatgctggactgtctaccacggggccggaacaggaccatcgcatcacccaagggtcctgttattcagatgtataccaatgtagaccaagaccttgtgggttggcccgccccctcaggtgcccgctcgttgacgccctgcacttgcggctcctcggacctttacctggtcacgaggcacgccgatgtcattcccgtgcgccggcggggtgatagcaggggcagcctgctttcgccccggcccatttcctattgaaaggctcctcggggggtccactgttgtgccccgcggggcacgccgtgggcatatttagggccgcggtgtgcacccgtggagtggctaaggcggtggacttcatccctgtggagaacctagagacaaccatgaggtctccggtgttcacggacaactcctctccaccagcagtgccccagagcttccaggtggcccacctgcatgctcccacaggagcggcaagagcaccaaggtcccggctgcatacgcagctcagggctataaggtgctagtgctcaacccctctgttgctgcaacactgggctttggtgcctacatgtccaaggcccacgggatcgagcctaacatcaggaccggggtgagaacaattaccactggcagccccatcacgtactccacctacggtaagttccttgccgacggcgggtgctcgggggcgcttatgacataataatttgtgacgagtgccactccacggatgccacatccatcttgggcatcggcactgtccttgatcaggcagagaccgcgggggcgagactggtcgtgctcgccaccgctacccctccgggctccgtcaccgtgccccatcccaacatcgaggaggttgctctgtccaccaccggagagatccctttttacggcaaggcatccccctcgacgcaatcaagggggggaggcatctcatcttctgccactcaaaaaagaagtgcgacgagctcgccgcaaaactggtcgcattgggcgttaatgccgtggcctactaccgcggtcttgacgtgtctgtcatcccgaccagcggcgacgttgtcgtcgtggcaaccgatgctctcatgaccggctatactggcgacttcgattcggtggtgactgtaacacgtgtgtcacccagacagtcgatttcagccttgaccctacctttaccatcgagacaaccacgcttccccaggacgctgtctcccgcactcaacgtcggggcaggactggcagggggaagccaggcatctacagatttgtggcaccgggagagcgcccctccggcatgttcgactcgtccgtcctctgtgagtgctatgacgcaggctggcttggtatgagctcacgcccgctgagactacagttaggctacgagcgtacatgaacaccccggggctccccgtgtgccaagaccatcttgaattttgggagggcgtctttacaggtctcactcatatagacgcccacttcctatcccagacaaagcagagtggggagaaccttccttacctggtagcgtaccaagccaccgtgtgcgctagggctcagcccctcccccatcgtgggaccagatgtggaaatgtttgacccgcctcaagcccactctccatggaccaacgcccctgctatacagactgggcgctgtgcagaatgaggtcaccctgacgcatccagtcaccaaatacatcatgacatgca

SEQ ID NO: 743 - DNA, 4856 bp, Hepatitis C virus
gcggtcagatcgttggtggagtttacttgttgccgcgcaggggccctagattgggtgtgcgcgcgacgaggaagacttccgagcggtcgcaacctcgaggtagacgtcagcctatccccaaggcacgcggcccgagggcaggacctggactcagcccggatatcctaggcccctctatggcaatgagggctgcgggtgggcgggatggctcctgtctccccgcggctctcggcctagttggggccccacggacccccggcgtaggtcgcgcaatttgggtaaggtcatcgatacccttacgtgcggcttcgccgacctcatggggtacataccgctcgtcggcgccctctcggaggcgctgccagggccctggcgcatggcgtccgggtcctggaagacggcgtgaactatgcaacagggaatcttcctggttgctctttctctatcttcctcctggccctgctctcttgtctgaccgtgcccgcttcagcctaccaagtgcgcaactccacggggctctaccatgtcaccaatgattgccctaattcgagtattgtgttcgagcgcacgatgttatcctgcacactccggggtgtgtcccttgcgttcgcgagggtaacgtctcgaggtgctgggtggcgctgacccccacggtggccaccagggatggcaacctccccgcgacgcaaattcgacgtcacatcgatctgcttgtcgggagtgccaccctttgttcggccctctacgtgggggacctgtgcgggtctgtctttcttatcggcaactgtttaccttctctcccaggcgtcactggacgacgcaagactgcaactgctctatgtatcccggccacataacgggtcaccgcatggcatgggacatgatgatgaactggtctcctacgacggcgttggtagtggctcagctgctccggatcccacaagccatcttggacatgatcgctggtgctcactggggagtcctggcgggcatggcgtattctccatggtggggaactgggcgaaggttctggtagtgctgctgctatttgccggcgtcgacgcggaaacccacgtcaccgggggagctgtcgcccacgccgcgtatgggatccaggctggtctcagtaatttcttcaaggcaggccccaaacagaacatccagctgatcaacaccaacaacagttggcacatcaatcgcacagccttgaactgtaagatagccttgacaccggctggatagcagggcttttctattatcacaatttcaactcttcaggctgtcccgagaggttggccagctgccgacgccttaccgattttagccagggctggggccctatcagttatgccaacggaagcggccctgaccaacgcccctactgctggcactactccccaaaaccttgcggtgttgtgcccgcgagcaccgtgtgggcccggtatattgcttcactcccagccctgtggtggtgggaacgaccgacagacggggcgcgcccacctacaactggggtgcacgggaggaggacgtcttcgtccttaacaacaccaggccaccgctgggcaattggttcggttgcatctggatgaactcatctggattcaccaaagcttgcggagcgcctccctgcgtcatcggaggggtgggcaaaacaccttgcactgccccactgattgtttccgcaagcacccagaagctacatactctcggtgcggttctggcccctggattacacccaggtgcctggtcaactacccgtataggctttggcactatccttgtaccatcaactacaccttattcaaagtcaggatgtatgtgggaggggtcgagcacaggctggacgctgcttgcaactggacgcgggggaacgttgtgatctggaagacagggacaggtccgagcttagcccgttgttgctgtccactacacagtggcaggtccttccgtgttcattcacgaccctgccagccttgtccaccggcctcatccacctccaccagaacatcgtggacgtgcagtacctctacggggtggggtcaagcatcgtgtcctgggccatcaagtgggagtacgtcgttctcctttccttctgcttgcagatgcacgtgtctgctcctgcttgtggatgatgctactcatatcccaagcggaggcagccttagagaacctcatagtactcaatgcagcatctctggccgggacgcaaggtcttgtatctttcctcgtgttcttctgctttgcgtggtacctgaagggtaggtgggtgcccggagtggcctacgccctctacgggatgtggccctcctcctgctcctgttggcgttgccccagcgggcatacgcgttggacacggaggtggccgcgtcgtgtggcggtgctgtcctcgtcgggttaatggcgctgactctgtcaccatattacaagcactatatcagctggtgcttgtggtggcttcagtattttctgaccagagtagaagcgcagctgcacgtgtgggttccccccctcaacgttcgagggggcgtgacgccatcatcttactcatgtgtgccgtacacccgactctggtatttgacatctccaaactactgctggctgtcttcgggcccctctggattcttcaagccagtttgcttaaagtaccctactttgtgcgcgtccaaggccttctccgggtctgcgcgctagcgcggaagatggctggaggtcattacgtgcaaatggctgtcatcaagttggggcgcttactggcacctatattttcaatcatctcactcctcttcgggactgggcgcacaacggcctacgtgatctggccgtggccgtagaaccagtcaccttctcccaaatggagaccaagctcatcacgtggggggcggacactgccgcctgcggtgacatcatcaacggcttgcccgtctccgcccgtaggggccgggagatattgcttgggccgccgatgggatggtctccaaggggtggaggctgctggcacccatcacggcatacgcccagcagacgaggggccttctagggtgtataatcaccagcttaactggccgggacaagaaccaagtggagggtgaggtccagattatatcaactgccactcaaactttcttggcaacgtgcatcaatggggtatgctggactgtctaccacggggccggaacaggaccatcgcatcacccaagggtcctgtcattcagatgtataccaatgtagaccaagaccttgtgggttggcccgccccttcaggtgcccgctcgttgacgccctgcacttgcggctcctcggacctttacctggtcacgaggcacgccgatgtcattcccgtgcgccggcggggtgatagcaggggcagcctgctttcgccccggcccatttcctattgaaaggctcctcggggggtccactgttgtgccccgcggggcacgccgtgggcatatttagggccgcggtgtgcacccgtggagtggctaaggcagtggacttcatccctgtggagaacctagagacaaccatgaggtccccggtgttcacggacaactcctctccaccagcagtgccccagagcttccaggtggcccacctgcatgctcccacaggagcggcaagagcaccaaggtcccggctgcgtacgcagctcagggctataaggtgctagtgctcaacccctctgttgccgcaacactgggctttggtgcctacatgtccaaggcccacgggatcgagcctaacatcaggaccggggtgagaacaattaccactggcagccccatcacgtactccacctacggtaagttctttgccgacggcgggtgctcgggggcgcttatgacataataatttgtgacgagtgccactccacggatgccacatccatcttgggcatcggcactgtccttgatcaggcagagaccgcgggggcgagactggtcgtgctcgccaccgctacccctccgggctccgtcaccgtgccccatcccaacatcgaggaggttgctctgtccaccaccggagagatccctttttacggcaaggcatccccctcgacgcaatcaagggggggaggcatctcatcttctgtcactcaaaaaagaagtgcgacgagctcgccgcaaaactggtcgcattgggcgttaatgccgtggcctactaccgcggtcttgacgtgtctgtcatcccgaccagcggcgacgttgtcgtcgtggcaaccgatgctctcatgaccggctatactggcgacttcgattcggtgatgactgtaacacgtgtgtcacccagacagtcgatttcagccttgaccctacctttaccatcgagacaaccacgcttccccaggacgctgtctcccgcactcaacgtcggggcaggactggcagggggaagccaggcatctacagatttgtggcaccgggagagcgtccctccggcatgttcgactcgtccgtcctctgtgagtgctatgacgcaggctggcttggtatgagctcacgcccgctgagactacagttaggctacgagcgtacatgaacaccccggggctccccgtgtgccaagaccatcttgaattttgggagggcgtctttacaggtctcactcacatagacgcccacttcctatcccagacaaagcagagtggggagaaccttccttacctggtagcgtaccaagccaccgtgtgcgctagggctcagcccctcccccatcgtgggaccagatgtggaaatgtttgacccgcctcaagcccactctccatggaccaacgcccctgctatacagactgggcgctgtgcagaatgaggtcaccctgacgcatccagtcaccaaatacatcatgacatgca

SEQ ID NO: 744 - DNA, 4856 bp, Hepatitis C virus
gcggtcagatcgttggtggagtttacttgttgccgcgcaggggccctagattgggtgtgcgcgcgacgaggaagacttccgagcggtcgcaacctcgaggtagacgtcagcctatccccaaggcacgcggcccgagggcaggacctggactcagcccggatatcctaggcccctctatggcaatgagggctgcgggtgggcgggatggctcctgtctccccgcggctctcggcctagttggggccccacggacccccggcgtaggtcgcgcaatttgggtaaggtcatcgatacccttacgtgcggcttcgccgacctcatggggtacataccgctcgtcggcgccctctcggaggcgctgccagggccctggcgcatggcgtccgggtcctggaagacggcgtgaactatgcaacagggaatcttcctggttgctctttctctatcttcctcctggccctgctctcttgtctgaccgtgcccgcttcagcctaccaagtgcgcaactccacggggctctaccatgtcaccaatgattgccctaattcgagtattgtgttcgagcgcacgatgttatcctgcacactccggggtgtgtcccttgcgttcgcgagggtaacgtctcgaggtgctgggtggcgctgacccccacggtggccaccagggatggcaacctccccgcgacgcaaattcgacgtcacatcgatctgcttgtcgggagtgccaccctttgttcggccctctacgtgggggacctgtgcgggtctgtctttcttatcggcaactgtttaccttctctcccaggcgtcactggacgacgcaagactgcaattgctctatgtatcccggccacataacgggtcaccgcatggcatgggacatgatgatgaactggtctcctacgacggcgttggtagtggctcagctgctccggatcccacaagccatcttggacatgatcgctggtgctcactggggagtcctggcgggcatagcgtattctccatggtggggaactgggcgaaggttctggtagtgctgctgctatttgccggcgttgacgcggaaacccacgtcaccgggggagctgtcgcccacgccgcgtatgggatccaggctggtctcagtaatttcttcaggccaggccccaaacagaacatccagctgatcaacaccaacaacagttggcacatcaatcgcacggccttgaactgtaagacagccttgacaccggctggatagcagggcttttctactatcacaatttcaactcttcaggctgtcccgagaggttggccagctgccgacgccttaccgattttggccagggctggggccctatcagttatgccaacggaagcggccctgaccaacgcccctactgctggcactactccccaaaaccttgcggtgttgtgcccgcgagcaccgtgtgggcccggtatattgcttcactcccagccctgtggtggtgggaacgaccgacagacggggcgcgcccacctacaactggggcatacgggaggaggacgtcttcgtccttaacaacaccaggccaccgctgggcaattggtttggttgcatctggatgaactcatctggattcaccaaagcttgcggagcgcctccttgcgtcatcggaggggtgggcaaaacaccttgcactgccccactgattgtttccgcaagcacccggaagctacatactctcggtgcggctctggcccctggatcacacccaggtgcttggtcaactacccgtataggctctggcattatccttgtaccatcaactacaccttattcaaagtcaggatgtatgtgggaggggtcgagcacaggctggatgctgcttgcaactggacgcgggggaacgttgtgatctggaagacagggacaggtccgagcttagcccgttgttgctgtccactacacagtggcaggtccttccgtgttcattcacgaccctgccagccttgtccaccggcctcatccacctccaccagaacatcgtggacgtgcagtacctctacggggtggggtcaagcatcgtgtcctgggccatcaagtgggagtacgtcgttctcctttccttctgcttgcagatgcacgtgtctgctcctgcttgtggatgatgctactcatatcccaagcggaggcagccttagagaacctcatagtactcaatgcagcatctctggccgggacgcaaggtcttgtatctttcctcgtgttcttctgctttgcgtggtacctgaagggtaggtgggtgcccggagtggcctacgccctctacgggatgtggccctcctcctgctcctgttggcgttgccccagcgggcatacgcgttggacacggaggtggccgcgtcgtgtggcggtgctgtcctcgtcgggttaatggcgctgactctgtcaccatattacaagcactatatcagctggtgcttgtggtggcttcagtattttctgaccagagtagaagcgcagctgcacgtgtgggttccccccctcaacgttcgagggggcgtgacgccatcatcttactcatgtgtgccgtacacccgactctggtatttgacatctccaaactactgctggccgtcttcgggcccctctggattcttcaagccagtttgcttaaagtaccctactttgtgcgcgtccaaggccttctccgggtctgcgcgctagcgcggaagatggctggaggtcattacgtgcagatggctatcatcaagttggggcgcttactggcacctatatttacaatcatctcactcctcttcgggactgggcgcacaacggcctacgtgatctggccgtggccgtggaaccagtcaccttctcccaaatggagaccaagcttatcacgtggggggcggacactgccgcctgcggtgacatcatcaacggcttgcccgtctccgcccgtaggggccgggagatattgcttgggccgccgacgggatggtctccaaggggtggaggctgctggcacccatcacggcatacgcccagcagacgaggggccttctagggtgcataatcaccagcttaactggccgggacaagaaccaagtggagggtgaggtccagattatatcaactgccactcaaactttcttggcaacgtgcatcaatggggtatgctggactgtctaccacggggccggaacaggaccatcgcatcacccaagggtcctgttattcagatgtataccaatgtagaccaagaccttgtgggttggcccgccccctcaggtgcccgctcgttgacgccctgcacttgcggctcctcggacctttacctggtcacgaggcacgccgatgtcattcccgtgcgccggcggggtgatagcaggggcagcctgctttcgccccggcccatttcctattgaaaggctcctcggggggtccactgttgtgccccgcggggcacgccgtgggcatatttagggccgcggtgtgcacccgtggagtggctaaggcggtggacttcatccctgtggagaacctagagacaaccatgaggtctccggtgttcacggacaactcctctccaccagcagtgccccagagcttccaggtggcccacctgcatgctcccacaggagcggcaagagcaccaaggtcccggctgcatacgcagctcagggctataaagtgctagtgcttaacccctctgttgctgcaacactgggctttggtgcctacatgtccaaggcccacgggatcgagcctaacatcaggaccggggtgagaacaattaccactggcagccccatcacgtactccacctacggtaagttccttgccgacggcgggtgctcgggggcgcttatgacataataatttgtgacgagtgccactccacggatgccacatccatcttgggcatcggcactgtccttgatcaggcagagaccgcgggggcgagactggtcgtgctcgccaccgctacccctccgggctccgtcaccgtgccccatcccaacatcgaggaggttgctctgtccaccaccggagagatccctttttacggcaaggcatccccctcgacgcaatcaagggggggaggcatctcatcttctgccactcaaaaaaaaagtgcgacgagctcgccgcaaaactggtcgcattgggcgttaatgccgtggcctactaccgcggtcttgacgtgtctgtcatcccgaccagcggcgacgttgtcgtcgtggcaaccgatgctctcatgaccggctatactggcgacttcgattcggtggtgactgtaacacgtgtgtcacccagacggtcgatttcagccttgaccctacctttaccatcgagacaaccacgcttccccaggacgctgtctcccgcactcaacgtcggggcaggactggcagggggaagccaggcatctacagatttgtggcaccgggagagcgcccctccggcatgttcgactcgtccgtcctctgtgagtgctatgacgcaggctggcttggtatgagctcacgcccgctgagactacagttaggctacgagcgtacatgaacaccccggggctccccgtgtgccaagaccatcttgaattttgggagggcgtctttacaggtctcactcatatagacgcccacttcctatcccagacaaagcagagtggggagaaccttccttacctggtagcgtaccaagccaccgtgtgcgctagggctcagcccctcccccatcgtgggaccagatgtggaaatgtttgacccgcctcaagcccactctccatggaccaacgcccctgctatacagactgggcgctgtgcagaatgaggtcaccctgacgcatccagtcaccaaatacatcatgacatgca

SEQ ID NO: 745 - DNA, 4856 bp, Hepatitis C virus
gcggtcagatcgttggtggagtttacttgttgccgcgcaggggccctagattgggtgtgcgcgcgacgaggaagacttccgagcggtcgcaacctcgaggtagacgtcagcctatccccaaggcacgcggcccgagggcaggacctgggctcagcccggatatcctaggcccctctatggcaatgagggctgcgggtgggcgggatggctcctgtctccccgcggctctcggcctagttggggccccacggacccccggcgtaggtcgcgcaatttgggtaaggtcatcgatacccttacgtgcggcttcgccgacctcatggggtacataccgctcgtcggcgccctctcggaggcgctgccagggccctggcgcatggcgtccgggtcctggaagacggcgtgaactatgcaacagggaatcttcctggttgctctttctctatcttcctcctggccctgctctcttgtctgaccgtgcccgcttcagcctaccaagtgcgcaactccacggggctctaccatgtcaccaatgattgccctaattcgagtattgtgttcgagcgcacgatgttatcctgcacactccggggtgtgtcccttgcgttcgcgagggtaacgtctcgaggtgctgggtggcgctgacccccacggtggccaccagggatggcaacctccccgcgacgcaaattcgacgtcacatcgatctgcttgtcgggagtgccaccctttgttcggccctctacgtgggggacctgtgcgggtctgtctttcttatcggcaactgtttaccttctctcccaggcgtcactggacgacgcaagactgcaactgctctatgtatcccggccacataacgggtcaccgcatggcatgggacatgatgatgaactggtctcctacgacggcgttggtagtggctcagctgctccggatcccacaagccatcttggacatgatcgctggtgctcactggggagtcctggcgggcatggcgtattctccatggtggggaactgggcgaaggttctggtagtgctgctgctatttgccggcgtcgacgcggaaacccacgtcaccgggggagctgtcgcccacgccgcgtatgggatccaggctggtctcagtaatttcttcaaggcaggccccaaacagaacatccagctgatcaacaccaacaacagttggcacatcaatcgcacagccttgaactgtaagatagccttgacaccggctggatagcagggcttttctattatcacaatttcaactcttcaggctgtcccgagaggttggccagctgccgacgccttaccgattttagccagggctggggccctatcagtcatgccaacggaagcggccctgaccaacgcccctactgctggcactactccccaaaaccttgcggtgttgtgcccgcgagcaccgtgtgggcccggtatattgcttcactcccagccctgtggtggtgggaacgaccgacagacggggcgcgcccacctacaactggggtgcacgggaggaggacgtcttcgtccttaacaacaccaggccaccgctgggcaattggttcggttgcatctggatgaactcatctgggttcaccaaagcttgcggagcgcctccctgcgtcatcggaggggtgggcaaaacaccttgcactgccccactgattgtttccgcaagcacccagaagctacatactctcggtgcggttctggcccctggattacacccaggtgcctggtcaactacccgtataggctttggcactatccttgtaccatcaactacaccttattcaaagtcaggatgtatgtgggaggggtcgagcacaggctggatgctgcttgcaactggacgcgggggaacgttgtgatctggaagacagggacaggtccgagcttagcccgttgttgctgtccactacacagtggcaggtccttccgtgttcattcacgaccctgccagccttgtccaccggcctcatccacctccaccagaacatcgtggacgtgcagtacctctacggggtggggtcaagcatcgtgtcctgggccatcaagtgggagtacgtcgttctcctttccttctgcttgcagatgcacgtgtctgctcctgcttgtggatgatgctactcatatcccaagcggaggcagccttagagaacctcatagtactcaatgcagcatctctggccgggacgcaaggtcttgtatctttcctcgtgttcttctgctttgcgtggtacctgaagggtaggtgggtgcccggagtggcctacgccctctacgggatgtggccctcctcctgctcctgttggcgttgccccagcgggcatacgcgttggacacggaggtagccgcgtcgtgtggcggtgctgtcctcgtcgggttaatggcgctgactctgtcaccatattacaagcactatatcagctggtgcttgtggtggcttcagtattttctgaccagagtagaagcgcagctgcacgtgtgggttccccccctcaacgttcgagggggcgtgacgccatcatcttactcatgtgtgccgtacacccgactctggtatttgacatctccaaactactgctggctgtcttcgggcccctctggattcttcaagccagtttgcttaaagtaccctactttgtgcgcgtccaaggccttctccgggtctgcgcgctagcgcggaagatggctggaggtcattacgtgcaaatggctatcatcaagttggggcgcttactggcacctatattttcaatcatctcactcctcttcgggactgggcgcacaacggcctacgtgatctggccgtggccgtagaaccagtcaccttctcccaaatggagaccaagctcatcacgtggggggcggacactgccgcctgcggtgacatcatcaacggcttgcccgtctccgcccgtaggggccgggagatattgcttgggccgccgatgggatggtctccaaggggtggaggctgctggcacccatcacggcatacgcccagcagacgaggggccttctagggtgtataatcaccagcttaactggccgggacaagaaccaagtggagggtgaggtccagattatatcaactgccactcaaactttcttggcaacgtgcatcaatggggtatgctggactgtctaccacggggccggaacaggaccatcgcatcacccaagggtcctgtcattcagatgtataccaatgtagaccaagaccttgtgggttggcccgccccttcaggtgcccgctcgttgacgccctgcacttgcggctcctcggacctttacctggtcacgaggcacgccgatgtcattcccgtgcgccggcggggtgatagcaggggcagcctgctttcgccccggcccatttcctattgaaaggctcctcggggggtccactgttgtgccccgcggggcacgccgtgggcatatttagggccgcggtgtgcacccgtggagtggctaaggcggtggacttcatccctgtggagaacctagagacaaccatgaggtccccggtgttcacggacaactcctctccaccagcagtgccccagagcttccaggtggcccacctgcatgctcccacaggagcggcaagagcaccaaggtcccggctgcgtacgcagctcagggctataaggtgctagtgctcaacccctctgttgccgcaacactgggctttggtgcctacatgtccaaggcccacgggatcgagcctaacatcaggaccggggtgagaacaattaccactggcagccccatcacgtactccacctacggtaagttccttgccgacggcgggtgctcgggggcgcttatgacataataatttgtgacgagtgccactccacggatgccacatccatcttgggcatcggcactgtccttgatcaggcagagaccgcgggggcgagactggtcgtgctcgccaccgctacccctccgggctccgtcaccgtgccccatcccaacatcgaggaggttgctctgtccaccaccggagagatccctttttacggcaaggcatccccctcgacgcaatcaagggggggaggcatctcatcttctgtcactcaaaaaagaagtgcgacgagctcaccgcaaaactggtcgcattgggcgttaatgccgtggcctactaccgcggtcttgacgtgtctgtcatcccgaccagcggcgacgttgtcgtcgtggcaaccgatgctctcatgaccggctatactggcgacttcgattcggtgatgactgtaacacgtgtgtcacccagacagtcgatttcagccttgaccctacctttaccatcgagacaaccacgcttccccaggacgctgtctcccgcactcaacgtcggggcaggactggcagggggaagccaggcatctacagatttgtggcaccgggagagcgcccctccggcatgttcgactcgtccgtcctctgtgagtgctatgacgcaggctggcttggtatgagctcacgcccgctgagactacagttaggctacgagcgtacatgaacaccccggggctccccgtgtgccaagaccatcttgaattttgggagggcgtctttacaggtctcactcacatagacgcccacttcctatcccagacaaagcagagtggggagaaccttccttacctggtagcgtaccaagccaccgtgtgcgctagggctcagcccctcccccatcgtgggaccagatgtggaaatgtttgacccgcctcaagcccactctccatggaccaacgcccctgctatacagactgggcgctgtgcagaatgaggtcaccctgacgcatccagtcaccaaatacatcatgacatgca

SEQ ID NO: 746 - DNA, 4856 bp, Hepatitis C virus
gcggtcagatcgttggtggagtttacttgttgccgcgcaggggccctagattgggtgtgcgcgcgacgaggaagacttccgagcggtcgcaacctcgaggtagacgtcagcctatccccaaggcacgcggcccgagggcaggacctgggctcagcccgggtatcctaggcccctctatggcaatgagggctgcgggtgggcgggatggctcctgtctccccgcggctctcggcctagttggggccccacggacccccggcgtaggtcgcgcaatttgggtaaggtcatcgatacccttacgtgcggcttcgccgacctcatggggtacataccgctcgtcggcgccctctcggaggcgctgccagggccctggcgcatggcgtccgggtcctggaagacggcgtgaactatgcaacagggaatcttcctggttgctctttctctatcttcctcctggccctgctctcttgtctgaccgtgcccgcttcagcctaccaagtgcgcaactccacagggctctaccatgtcaccaatgattgccctaattcgagtattgtgttcgagcgcacgatgttatcctgcacactccggggtgtgtcccttgcgttcgcgagggtaacgtctcgaggtgctgggtggcgctgacccccacggtggccaccagggatggcaacctccccgcgacgcaaattcgacgtcacatcgatctgcttgtcgggagtgccaccctttgttcggccctctacgtgggggacctgtgcgggtctgtctttcttatcggcaactgtttaccttctctcccaggcgtcactggacgacgcaagactgcaactgctctatgtatcccggccacataacgggtcaccgcatggcatgggacatgatgatgaactggtctcctacgacggcgttggtagtggctcagctgctccggatcccacaagccatcttggacatgatcgctggtgctcactggggagtcctggcgggcatggcgtattctccatggtggggaactgggcgaaggttctggtagtgctgctgctatttgccggcgtcgacgcggaaacccacgtcaccgggggagctgtcgcccacgccgcgtatgggatccaggctggtctcagtaatttcttcaaggcaggccccaaacagaacatccagctgatcaacaccaacaacagttggcacatcaatcgcacagccttgaactgtaagatagccttgacaccggctggatagcagggcttttctattaccacaatttcaactcttcaggctgtcccgagaggttggccagctgccgacgccttaccgattttagccagggctggggccctatcagtcatgccaacggaagcggccctgaccaacgcccctactgctggcactactccccaaaaccttgcggtgttgtgcccgcgagcaccgtgtgggcccggtatattgcttcactcccagccctgtggtggtgggaacgaccgacagacggggcgcgcccacctacgactggggtgcacgggaggaggacgtcttcgtccttaacaacaccaggccaccgctgggcaattggttcggttgcatctggatgaactcatctggattcaccaaagcttgcggagcgcctccctgcgtcatcggaggggtgggcaaaacaccttgcactgccccactgattgtttccgcaagcacccagaagctacatactctcggtgcggttctggcccctggattacacccaggtgcctggtcaactacccgtataggctttggcactatccttgtaccatcaactacaccttattcaaagtcaggatgtatgtgggaggggtcgagcacaggctggatgctgcttgcaactggacgcgggggaacgttgtgatctggaagacagggacaggtccgagcttagcccgttgttgctgtccactacacagtggcaggtccttccgtgttcattcacgaccctgccagccttgtccaccggcctcatccacctccaccagaacatcgtggacgtgcagtacctctacggggtggggtcaagcatcgtgtcctgggccatcaagtgggagtacgtcgttctcctttccttctgcttgcagatgcacgtgtctgctcctgcttgtggatgatgctactcatatcccaagcggaggcagccttagagaacctcatagtactcaatgcagcatctctggccgggacgcaaggtcttgtatctttcctcgtgttcttctgctttgcgtggtacctgaagggtaggtgggtgcccggagtggcctacgccctctacgggatgtggccctcctcctgctcctgttggcgttgccccagcgggcatacgcgttggacacggaggtggccgcgtcgtgtggcggtgctgtcctcgtcgggttaatggcgctgactctgtcaccatattacaagcactatatcagctggtgcttgtggtggcttcagtattttctgaccagagtagaagcgcagctgcacgtgtgggttccccccctcaacgttcgagggggcgtgacgccatcatcttactcatgtgtgccgtacacccgactctggtatttgacatctccaaactactgctggctgtcttcgggcccctctggattcttcaagccagtttgcttaaagtaccctactttgtgcgcgtccaaggccttctccgggtctgcgcgctagcgcggaagatggctggaggtcattacgtgcaaatggctatcatcaagctggggcgcttactggcacctatattttcaatcatctcactcctcttcgggactgggcgcacaacggcctacgtgatctggccgtggccgtagaaccagtcaccttctcccaaatggagaccaagctcatcacgtggggggcagacactgccgcctgcggtgacatcatcaacggcttgcccgtctccgcccgtaggggccgggagatattgcttgggccgccgatgggatggtctccaaggggtggaggctgctggcacccatcacggcatacgcccagcagacgaggggccttctagggtgtataatcaccagcttaactggccgggacaagaaccaagtggagggtgaggtccagattatatcaactgccactcaaactttcttggcaacgtgcatcaatggggtatgctggactgtctaccacggggccggaacaggaccatcgcatcacccaagggtcctgtcattcagatgtataccaatgtagaccaagaccttgtgggttggcccgccccttcaggtgcccgctcgttgacgccctgcacttgcggctcctcggacctttacctggtcacgaggcacgccgatgtcattcccgtgcgccggcggggtgatagcaggggcagcctgctttcgccccggcccatttcctattgaaaggctcctcggggggtccactgttgtgccccgcggggcacgccgtgggcatatttagggccgcggtgtgcacccgtggagtggctaaggcggtggacttcatccctgtggagaacctagagacaaccatgaggtccccggtgttcacggacaactcctctccaccagcagtgccccagagcttccaggtggcccacctgcatgctcccacaggagcggcaagagcaccaaggtcccggctgcgtacgcagcccagggctataaggtgctagtgctcaacccctctgttgccgcaacactgggctttggtgcctacatgtccaaggcccacgggatcgagcctaacatcaggaccggggtgagaacaattaccactggcagccccatcacgtactccacctacggtaagttccttgccgacggcgggtgctcgggggcgcttatgacataataatttgtgacgagtgccactccacggatgccacatccatcttgggcatcggcactgtccttgatcaggcagagaccgcgggggcgagactggtcgtgctcgccaccgctacccctccgggctccgtcaccgtgccccatcccaacatcgaggaggttgctctgtccaccaccggagagatccctttttacggcaaggcatccccctcgacgcaatcaagggggggaggcatctcatcttctgtcactcaaaaaagaagtgcgacgagctcgccgcaaaactggtcgcattgggcgttaatgccgtggcctactaccgcggtcttgacgtgtctgtcatcccgaccagcggcgacgttgtcgtcgtggcaaccgatgctctcatgaccggctatactggcgacttcgattcggtgatgactgtaacacgtgtgtcacccagacagtcgatttcagccttgaccctacctttaccatcgagacaaccacgcttccccaggacgctgtctcccgcactcaacgtcggggcaggactggcagggggaagccaggcatctacagatttgtggcaccgggagagcgcccctccggcatgttcgactcgtccgtcctctgtgagtgctatgacgcaggctggcttggtatgagctcacgcccgctgagactacagttaggctacgagcgtacatgaacaccccggggctccccgtgtgccaagaccatcttgaattttgggagggcgtctttacaggtctcactcacatagacgcccacttcctatcccagacaaagcagagtggggagaaccttccttacctggtagcgtaccaagccaccgtgtgcgctagggctcagcccctcccccatcgtgggaccagatgtggaaatgtttgacccgcctcaagcccactctccatggaccaacgcccctgctatacagactgggcgctgtgcagaatgaggtcaccctgacgcatccagtcaccaaatacatcatgacatgca

SEQ ID NO: 747 - DNA, 4856 bp, Hepatitis C virus
gcggtcagatcgttggtggagtttacttgttgccgcgcaggggccctagattgggtgtgcgcgcgacgaggaagacttccgagcggtcgcaacctcgaggtagacgtcagcctatccccaaggcacgcggcccgagggcaggacctggactcagcccggatatcctaggcccctctatggcaatgagggctgcgggtgggcgggatggctcttgtctccccgcggctctcggcctagttggggccccacggacccccggcgtaggtcgcgcaacttgggtaaggtcatcgatacccttacgtgcggcttcgccgacctcatggggtacataccgctcgtcggcgccctctcggaggcgctgccagggccctggcgcatggcgtccgggtcctggaagacggcgtgaactatgcaacagggaatcttcctggttgctctttctctatcttcctcctggccctgctctcttgtctgaccgtgcccgcttcagcctaccaagtgcgcaactccacggggctctaccatgtcaccaatgattgccctaattcgagtattgtgttcgagcgcacgatgttatcctgcacactccggggtgtgtcccttgcgttcgcgagggtaacgtctcgaggtgctgggtggcgctgacccccacggtggccaccagggatggcaacctccccgcgacgcaaattcgacgtcacatcgatctgcttgtcgggagtgccaccctttgttcggccctctacgtgggggacctgtgcgggtctgtctttcttatcggcaactgtttaccttctctcccaggcgtcactggacgacgcaagactgcaattgctctatgtatcccggccacataacgggtcaccgcatggcatgggacatgatgatgaactggtctcccacgacggcgttggtagtggctcagctgctccggatcccacaagccatcttggacatgatcgctggtgctcactggggagtcctggcgggcatggcgtattctccatggtggggaactgggcgaaggttctggtagtgctgctgctatttgccggcgtcgacgcggaaacccacgtcaccgggggagctgtcgcccacgccgcgtatgggatccaggctggtctcagtaatttcttcaaggcaggccccaaacagaacatccagctgatcaacaccaacaacagttggcacatcaatcgcacggccttgaactgtaagacagccttgacaccggctggatagcagggcttttctattatcacaatttcaactcttcaggctgtcccgagaggttggccagctgccgacgccttaccgattttggccagggctggggccctatcagttatgccaacggaagcggccctgaccaacgcccctactgctggcactactccccaaaaccttgcggtgttgtgcccgcgagcaccgtgtgggcccggtatattgcttcactcccagccctgtggtggtgggaacgaccgacaaacggggcgcgcccacctacaactggggtacacgggaggaggacgtcttcgtccttaacaacaccaggccaccgctgggcaattggttcggttgcatctggatgaactcatctggattcaccaaagcttgcggagcgcctccctgcgtcatcggaggggtgggcaaaacaccttgcactgccccactgattgtttccgcaagcacccggaagctacatactctcggtgcggctctggcccctggattacacccaggtgcttggtcaactacccgtataggctttggcattatccttgtaccatcaactacaccttattcaaagtcaggatgtatgtgggaggggtcgagcacaggctggatgctgcttgcaactggacgcgggggaacgttgtgatctggaagacagggacaggtccgagcttagcccgttgttgctgtccactacacagtggcaggtccttccgtgttcattcacgaccctgccagccttgtccaccggcctcatccacctccaccagaacatcgtggacgtgcagtacctctacggggtggggtcaagcatcgtgtcctgggccatcaagtgggagtacgtcgttctcctttccttctgcttgcagatgcacgtgtctgctcctgcttgtggatgatgctactcatatcccaagcggaggcagccttagagaacctcatagtactcaatgcagcatctctggccgggacacaaggtcttgtatctttcctcgtgttcttctgctttgcgtggtacctgaagggtaggtgggtgcccggagtggcctacgccctctacgggatgtggccctcctcctgctcctgttggcgttgccccagcgggcatacgcgttggacacggaggtggccgcgtcgtgtggcggtgctgtcctcgtcgggttaatggcgctgactctgtcaccatattacaagcactatatcagctggtgcttgtggtggcttcagtattttctgaccagagtagaagcgcagctgcacgtgtgggttccccccctcaacgttcgagggggcgtgacgccatcatcttactcatgtgtgccgtacacccgactctggtatttgacatctccaaactactgctggccgtcttcgggcccctctggattcttcaagccagtttgcttaaagtaccctactttgtgcgcgtccaaggccttctccgggtctgcgcgctagcgcggaagatggctggaggtcattacgtgcaaatggctatcatcaagttggggcgcttactggcacctatatttacaatcatctcactcctcttcgggactgggcgcacaacggcctacgtgatctggccgtggccgtagaaccagtcaccttctcccaaatggagaccaagcttatcacgtggggggcggacactgccgcctgcggtgacatcatcaacggcttgcccgtctccgcccgtaggggccgggagatattgcttgggccgccgacgggatggtccccaaggggtggaggctgctggcacccatcacggcatacgcccagcagacgaggggccttctagggtgcataatcaccagcctaactggccgggacaagaaccaagtggagggtgaggtccagattatatcaactgccactcaaactttcttggcaacgtgcatcaatggggtatgctggactgtctaccacggggccggaacaggaccatcgcatcacccaagggtcctgttattcagatgtataccaatgtagaccaagaccttgtgggttggcccgccccctcaggtgcccgctcgttgacgccctgcacttgcggctcctcggacctttacctggtcacgaggcacgccgatgtcattcccgtgcgccggcggggtgatagcaggggcagcctgctttcgccccggcccatttcctattgaaaggctcctcggggggtccactgttgtgccccgcggggcacgccgtgggcatatttagggccgcggtgtgcacccgtggagtggctaaggcggtggacttcatccctgtggagaacctagagacaaccatgaggtctccggtgttcacggacaactcctctccaccagcagtgccccagagcttccaggtggcccacctgcatgctcccacaggagcggcaagagcaccaaggtcccggctgcatacgcagctcagggctataaggtgctagtgctcaacccctctgttgctgcaacactgggctttggtgcctacatgtccaaggcccacgggatcgagcctaacatcaggaccggggtgagaacaattaccactggcagccccatcacgtactccacctacggtaagttccttgccgacggcgggtgctcgggggcgcttatgacataataatttgtgacgagtgccactccacggatgccacatccattttgggcatcggcactgtccttgatcaggcagagaccgcgggggcgagactggtcgtgctcgccaccgctacccctccgggctccgtcaccgtgccccatcccaacatcgaggaggttgctctgtccaccaccggagagatccctttttacggcaaggcatccccctcgacgcaatcaagggggggaggcatctcatcttctgccactcaaaaaagaagtgcgacgagctcgccgcaaaactggtcgcattgggcgttaatgccgtggcctactaccgcggtcttgacgtgtctgtcatcccgaccagcggcgacgttgtcgtcgtggcaaccgatgctctcatgaccggctatactggcgacttcgattcggtggtgactgtaacacgtgtgtcacccagacagtcgatttcagccttgaccctacctttaccatcgagacaaccacgcttccccaggacgctgtctcccgcactcaacgtcggggcaggactggcagggggaagccaggcatctacagatttgtggcaccgggagagcgcccctccggcatgttcgactcgtccgtcctatgtgagtgctatgacgcaggctggcttggtatgagctcacgcccgctgagactacagttaggctacgagcgtacatgaacaccccggggctccccgtgtgccaagaccatcttgaattttgggagggcgtctttacaggtctcactcatatagacgcccacttcctatcccagacaaagcagagtggggagaaccttccttacctggtagcgtaccaagccaccgtgtgcgctagggcccagcccctcccccatcgtgggaccagatgtggaaatgtttgacccgcctcaagcccactctccatggaccaacgcccctgctatacagactgggcgctgtgcagaatgaggtcaccctgacgcatccagtcaccaaatacatcatgacatgca

SEQ ID NO: 748 - DNA, 4856 bp, Hepatitis C virus
gcggtcagatcgttggtggagtttacttgttgccgcgcaggggccctagattgggtgtgcgcgcgacgaggaagacttccgagcggtcgcaacctcgaggtagacgtcagcctatccccaaggcacgcggcccgagggcaggacctgggctcagcccggatatcctaggcccctctatggcaatgagggctgcgggtgggcgggatggctcctgtctccccgcggctctcggcctagttggggccccacggacccccggcgtaggtcgcgcaatttgggtaaggtcatcgatacccttacgtgcggcttcgccgacctcatggggtacataccgctcgtcggcgccctctcggaggcgctgccagggccctggcgcatggcgtccgggtcctggaagacggcgtgaactatgcaacagggaatcttcctggttgctctttctctatcttcctcctggccctgctctcttgtctgaccgtgcccgcttcagcctaccaagtgcgcaactccacggggctctaccatgtcaccaatgattgccctaattcgagtattgtgttcgagcgcacgatgttatcctgcacactccggggtgtgtcccttgcgttcgcgagggtaacgtctcgaggtgctgggtggcgctgacccccacggtggccaccagggatggcaacctccccgcgacgcaaattcgacgtcacatcgatctgcttgtcgggagtgccaccctttgttcggccctctacgtgggggacctgtgcgggtctgtctttcttatcggcaactgtttaccttctctcccaggcgtcactggacgacgcaagactgcaactgctctatgtatcccggccacataacgggtcaccgcatggcatgggacatgatgatgaactggtctcctacgacggcgttggtagtggctcagctgctccggatcccacaagccatcttggacatgatcgctggtgctcactggggagtcctggcgggcatggcgtattctccatggtggggaactgggcgaaggttctggtagtgctgctgctatttgccggcgtcgacgcggaaacccacgtcaccgggggagctgtcgcccacgccgcgtatgggatccaggctggtctcagtaatttcttcaaggcaggccccaaacagaacatccagctgatcaacaccaacaacagttggcacatcaatcgcacagccttgaactgtaagatagccttgacaccggctggatagcagggcttttctattatcacaatttcaactcttcaggctgtcccgagaggttggccagctgccgacgccttaccgattttagccagggctggggccctatcagtcatgccaacggaagcggccctgaccaacgcccctactgctggcactactccccaaaaccttgcggtgttgtgcccgcgagcaccgtgtgggcccggtatattgcttcactcccagccctgtggtggtgggaacgaccgacagacggggcgcgcccacctacaactggggtgcacgggaggaggacgtcttcgtccttaacaacaccaggccaccgctgggcaattggttcggttgcatctggatgaactcatctggattcaccaaagcttgcggagcgcctccctgcgtcatcggaggggtgggcaaaacaccttgcactgccccactgattgtttccgcaagcacccagaagctacatactctcggtgcggttctggcccctggattacacccaggtgcctggtcaactacccgtataggctttggcactatccttgtaccatcaattacaccttattcaaagtcaggatgtatgtgggaggggtcgagcacaggctggatgctgcttgcaactggacgcgggggaacgttgtgatctggaagacagggacaggtccgagcttagcccgttgttgctgtccactacacagtggcaggtccttccgtgttcattcacgaccctgccagccttgtccaccggcctcatccacctccaccagaacatcgtggacgtgcagtacctctacggggtggggtcaagcatcgtgtcctgggccatcaagtgggagtacgtcgttctcctttccttctgcttgcagatgcacgtgtctgctcctgcttgtggatgatgctactcatatcccaagcggaggcagccttagagaacctcatagtactcaatgcagcatctctggccgggacgcaaggtcttgtatctttcctcgtgttcttctgctttgcgtggtacctgaagggtaggtgggtgcccggagtggcctacgccctctacgggatgtggccctcctcctgctcctgttggcgttgccccagcgggcatacgcgttggacacggaggtggccgcgtcgtgtggcggtgctgtcctcgtcgggttaatggcgctgactctgtcaccatattacaagcactatatcagctggtgcttgtggtggcttcagtattttctgaccagagtagaagcgcagctgcacgtgtgggttccccccctcaacgttcgagggggcgtgacgccatcatcttactcatgtgtgccgtacacccgactctggtatttgacatctccaaactactgctggctgtcttcgggcccctctggattcttcaagccaggttgcttaaagtaccctactttgtgcgcgtccaaggccttctccgggtctgcgcgctagcgcggaagatggctggaggtcattacgtgcaaatggctatcatcaagttggggcgcttactggcacctatattttcaatcatctcactcctcttcgggactgggcgcacaacggcctacgtgatctggccgtggccgtagaaccagtcaccttctcccaaatggagaccaagctcatcacgtggggggcggacactgccgcctgcggtgacatcatcaacggcttgcccgtctccgcccgtaggggccgggagatattgcttgggccgccgatgggatggtctccaaggggtggaggctgctggcacccatcacggcatacgcccagcagacgaggggctttctagggtgtataatcaccagcttaactggccgggacaagaaccaagtggagggtgaggtccagattatatcaactgccactcaaactttcttggcaacgtgcatcaatggggtatgctggactgtctaccacggggccggaacaggaccatcgcatcacccaagggtcctgtcattcagatgtataccaatgtagaccaagaccttgtgggttggcccgccccttcaggtgcccgctcgttgacgccctgcacttgcggctcctcggacctttacctggtcacgaggcacgccgatgtcattcccgtgcgccggcggggtgatagcaggggcagcctgctttcgccccggcccatttcctattgaaaggctcctcggggggtccactgttgtgccccgcggggcacgccgtgggcatatttagggccgcggtgtgcacccgtggagtggctaaggcggtggacttcatccctgtggagaacctagagacaaccatgaggtccccggtgttcacggacaactcctctccaccagcagtgccccagagcttccaggtggcccacctgcatgctcccacaggagcggcaagagcaccaaggtcccggctgcgtacgcagctcagggctataaggtgctagtgctcaacccctctgttgccgcaacactgggctttggtgcctacatgtccaaggcccacgggatcgagcctaacatcaggaccggggtgagaacaattaccactggcagccccatcacgtactccacctacggtaagttccttgccgatggcgggtgctcgggggcgcttatgacataataatttgtgacgagtgccactccacggatgccacatccatcttgggcatcggcactgtccttgatcaggcagagaccgcgggggcgagactggtcgtgctcgccaccgctacccctccgggctccgtcaccgtgccccatcccaacatcgaggaggttgctctgtccaccaccggagagatccctttttacggcaaggcatccccctcgacgcaatcaagggggggaggcatctcatcttctgtcactcaaaaaagaagtgcgacgagctcgccgcaaaactggtcgcattgggcgttaatgccgtggcctactaccgcggtcttgacgtgtctgtcatcccgaccagcggcgacgttgtcgtcgtggcaaccgatgctctcatgaccggctatactggcgacttcgattcggtgatgactgtaacacgtgtgtcacccagacagtcgatttcagccttgaccctacctttaccatcgagacaaccacgcttccccaggacgctgtctcccgcactcaacgtcggggcaggactggcagggggaagccaggcatctacagatttgtggcaccgggagagcgcccctccggcatgttcgactcgtccgtcctctgtgagtgctatgacgcaggctggcttggtatgagctcacgcccgctgagactacagttaggctacgagcgtacatgaacaccccggggctccccgtgtgccaagaccatcttgaattttgggagggcgtctttacaggtctcactcacatagacgcccactttctatcccagacaaagcagagtggggagaaccttccttacctggtagtgtaccaagccaccgtgtgcgctagggctcagcccctcccccatcgtgggaccagatgtggaaatgtttgacccgcctcaagcccactctccatggaccaacgcccctgctatacagactgggcgctgtgcagaatgaggtcaccctgacgcatccagtcaccaaatacatcatgacatgca

SEQ ID NO: 749 - DNA, 4856 bp, Hepatitis C virus
gcggtcagatcgttggtggagtttacttgttgccgcgcaggggccctagattgggtgtgcgcgcgacgaggaagacttccgagcggtcgcaacctcgaggtagacgtcagcctatccccaaggcacgcggcccgagggcaggacctgggctcagcccggatatcctaggcccctctatggcaatgagggctgcgggtgggcgggatggctcctgtctccccgcggctctcggcctagttggggccccacggacccccggcgtaggtcgcgcaatttgggtaaggtcatcgatacccttacgtgcggcttcgccgacctcatggggtacataccgctcgtcggcgccctctcggaggcgctgccagggccctggcgcatggcgtccgggtcctggaagacggcgtgaactatgcaacagggaatcttcctggttgctctttctctatcttcctcctggccctgctctcttgtctgaccgtgcccgcttcagcctaccaagtgcgcaactccacggggctctaccatgtcaccaatgattgccctaattcgagtattgtgttcgagcgcacgatgttatcctgcacactccggggtgtgtcccttgcgttcgcgagggtaacgtctcgaggtgctgggtggcgctgacccccacggtggccaccagggatggcaacctccccgcgacgcaaattcgacgtcacatcgatctgcttgtcgggagtgccaccctttgttcggccctctacgtgggggacctgtgcgggtctgtctttcttatcggcaactgtttaccttctctcccaggcgtcactggacgacgcaagactgcaactgctctatgtatcccggccacataacgggtcaccgcatggcatgggacatgatgatgaactggtctcctacgacggcgttggtagtggctcagctgctccggattccacaagccatcttggacatgatcgctggtgctcactggggagtcctggcgggcatggcgtattctccatggtggggaactgggcgaaggttctggtagtgctgctgctatttgccggcgtcgacgcggaaacccacgtcaccgggggagctgtcgcccacgccgcgtatgggatccaggctggtctcagtaatttcttcaaggcaggccccaaacagaacatccagctgatcaacaccaacaacagttggcacatcaatcgcacagccttgaactgtaagatagccttgacaccggctggatagcagggcttttctattatcacaatttcaactcttcaggctgtcccgagaggttggccagctgccgacgccttaccgattttagccagggctggggccctatcagtcatgccaacggaagcggccctgaccaacgcccctactgctggcactactccccaaaaccttgcggtgttgtgcccgcgagcaccgtgtgggcccggtatattgcttcactcccagccctgtggtggtgggaacgaccgacagacggggcgcgcccacctacaactggggtgcacgggaggaggacgtcttcgtccttaacaacaccaggccaccgctgggcaattggttcggttgcatctggatgaactcatctggattcaccaaagcttgcggagcgcctccctgcgtcatcggaggggtgggcaaaacaccttgcactgccccactgattgtttccgcaagcacccagaagctacatactctcggtgcggttctggcccctggattacacccaggtgcctggtcaactacccgtataggctttggcactatccttgtaccatcaactacaccttattcaaagtcaggatgtatgtgggaggggtcgagcacaggctggatgctgcttgcaactggacgcgggggaacgttgtgatctggaagacagggacaggtccgagcttagcccgttgttgctgtccactacacagtggcaggtccttccgtgttcattcacgaccctgccagccttgtccaccggcctcatccacctccaccagaacatcgtggacgtgcagtacctctacggggtggggtcaagcatcgtgtcctgggccatcaagtgggagtacgtcgttctcctttccttctgcttgcagatgcacgtgtctgctcctgcttgtggatgatgctactcatatcccaagcggaggcagccttagagaacctcatagtactcaatgcagcatctctggccgggacgcaaggtcttgtatctttcctcgtgttcttctgctttgcgtggtacctgaagggtaggtgggtgcccggagtggcctacgccctctacgggatgtggccctcctcctgctcctgttggcgttgccccagcgggcatacgcgttggacacggaggtggccgcgtcgtgtggcggtgctgtcctcgtcgggttaatggcgctgactctgtcaccatattacaagcactatatcagctggtgcttgtggtggcttcagtattttctgaccagagtagaagcgcagctgcacgtgtgggttccccccctcaacgttcgagggggcgtgacgccatcatcttactcatgtgtgccgtacacccgactctggtatttgacatctccaaactactgctggctgtcttcgggcccctctggattcttcaagccagtttgcttaaagtaccctactttgtgcgcgtccaaggccttctccgggtctgcgcgctagcgcggaagatggctggaggtcattacgtgcaaatggctatcatcaagttggggcgcttactggcacctatattttcaatcatctcactcctcttcgggactgggcgcacaacggcctacgtgatctggccgtggccgtagaaccagtcaccttctcccaaatggagaccaagctcatcacgtggggggcggacactgccgcctgcggtgacatcatcaacggcttgcccgtctccgcccgtaggggccgggagatattgcttgggccgccgatgggatggtctccaaggggtggaggctgctggcacccatcacggcatacgcccagcagacgaggggccttctagggtgtataatcaccagcttaactggccgggacaagaaccaagtggagggtgaggtccagattatatcaactgccactcaaactttcttggcaacgtgcatcaatggggtatgctggactgtctaccacggggccggaacaggaccatcgcatcacccaagggtcctgtcattcagatgtataccaatgtagaccaagaccttgtgggttggcccgccccttcaggtgcccgctcgttgacgccctgcacttgcggctcctcggacctttacctggtcacgaggcacgccgatgtcattcccgtgcgccggcggggtgatagcaggggcagcctgctttcgccccggcccatttcctattgaaaggctcctcggggggtccactgttgtgccccgcggggcacgccgtgggcatatttagggccgcggtgtgcacccgtggagtggctaaggcggtggacttcatccctgtggagaacctagagacaaccatgaggtccccggtgttcacggacaactcctctccaccagcagtgccccagagcttccaggtggcccacctgcatgctcccacaggagcggcaagagcaccaaggtcccggctgcgtacgcagctcagggctataaagtgctagtgctcaacccctctgttgccgcaacactgggctttggtgcctacatgtccaaggcccacgggatcgagcctaacatcaggaccggggtgagaacaattaccactggcagccccatcacgtactccacctacggtaagttccttgccgacggcgggtgctcgggggcgcttatgacataataatttgtgacgagtgccactccacggatgccacatccatcttgggcatcggcactgtccttgatcaggcagagaccgcgggggcgagactggtcgtgctcgccaccgctacccctccgggctccgtcaccgtgccccatcccaacatcgaggaggttgctctgtccaccaccggagagatccctttttacggcaaggcatccccctcgacgcaatcaagggggggaggcatctcatcttctgtcactcaaaaaagaagtgcgacgagctcgccgcaaaactggtcgcattgggcgttaatgccgtggcctactaccgcggtcttgacgtgtctgtcatcccgaccagcggcgacgttgtcgttgtggcaaccgatgctctcatgaccggctatactggcgacttcgattcggtgatgactgtaacacgtgtgtcacccagacagtcgatttcagccttgaccctacctttaccatcgagacaaccacgcttccccaggacgctgtctcccgcactcaacgtcggggcaggactggcagggggaagccaggcatctacagatttgtggcaccgggagagcgcccctccggcatgttcgactcgtccgtcctctgtgagtgctatgacgcaggctggcttggtatgagctcacgcccgctgagactacagttaggctacgagcgtacatgaacaccccggggctccccgtgtgccaagaccatcttgaattttgggagggcgtctttacaggtctcactcacatagacgcccacttcctatcccagacaaagcagagtggggagaaccttccttacctggtagcgtaccaagccaccgtgtgcgctagggctcagcccctcccccatcgtgggaccagatgtggaaatgtttgacccgcctcaagcccactctccatggaccaacgcccctgctatacagactgggcgctgtgcagaatgaggtcaccctgacgcatccagtcaccaaatacatcatgacatgca

SEQ ID NO: 750 - DNA, 4856 bp, Hepatitis C virus
gcggtcagatcgttggtggagtttacttgttgccgcgcaggggccctagattgggtgtgcgcgcgacgaggaagacttccgagcggtcgcaacctcgaggtagacgtcagcctatccccaaggcacgcggcccgagggcaggacctgggctcagcccgggtatcctaggcccctctatggcaatgagggctgcgggtgggcgggatggctcctgtctccccgcggctcccggcctagttggggccccacggacccccggcgtaggtcgcgcaatttgggtaaggtcatcgatacccttacgtgcggcttcgccgacctcatggggtacataccgctcgtcggcgccctctcggaggcgctgccagggccctggcgcatggcgtccgggtcctggaagacggcgtgaactatgcaacagggaatcttcctggttgctctttctctatcttcctcctggccctgctctcttgtctgaccgtgcccgcttcagcctaccaagtgcgcaactccacggggctctaccatgtcaccaatgattgccctaattcgagtattgtgttcgagcgcacgatgttatcctgcacactccggggtgtgtcccttgcgtccgcgagggtaacgtctcgaggtgctgggtggcgctgacccccacggtggccaccagggatggcaacctccccgcgacgcaaattcgacgtcacatcgatctgcttgtcgggagtgccaccctttgttcggccctctacgtgggggacctgtgcgggtctgtctttcttatcggcaactgtttaccttctctcccaggcgtcactggacgacgcaagactgcaactgctctatgtatcccggccacataacgggtcaccgcatggcatgggacatgatgatgaactggtctcctacgacggcgttggtagtggctcagctgctccggatcccacaagccatcttggacatgatcgctggtgctcactggggagtcctggcgggcatggcgtattctccatggtggggaactgggcgaaggttctggtagtgctgctgctatttgccggcgtcgacgcggaaacccacgtcaccgggggagctgtcgcccacgccgcgtatgggatccaggctggtctcagtaatttcttcaaggcaggccccaaacagaacatccagctgatcaacaccaacaacagttggcacatcaatcgcacagccttgaactgtaagatagccttgacaccggctggatagcagggcttttctattatcacaatttcaactcttcaggctgtcccgagaggttggccagctgccgacgccttaccgattttagccagggctggggccctatcagtcatgccaacggaagcggccctgaccaacgcccctactgctggcactactccccaaaaccttgcggtgttgtgcccgcgagcaccgtgtgggcccggtatattgcttcactcccagccctgtggtggtgggaacgaccgacagacggggcgcgcccacctacaactggggtgcacgggaggaggacgtcttcgtccttaacaacaccaggccaccgctgggcaattggttcggttgcatctggatgaactcatctggattcaccaaagcttgcggagcgcctccctgcgtcatcggaggggtgggcaaaacaccttgcactgccccactgattgtttccgcaagcacccagaagctacatactctcggtgcggttctggcccctggattacacccaggtgcctggtcaactacccgtataggctttggcactatccttgtaccatcaactacaccttattcaaagtcaggatgtatgtgggaggggtcgagcacaggctggatgctgcttgcaactggacgcgggggaacgttgtgatctggaagacagggacaggtccgagcttagcccgttgttgctgtccactacacagtggcaggtccttccgtgttcattcacgaccctgccagccttgtccaccggcctcatccacctccaccagaacatcgtggacgtgcagtacctctacggggtggggtcaagcatcgtgtcctgggccatcaagtgggagtacgtcgttctcctttccttctgcttgcagatgcacgtgtctgctcctgcttgtggatgatgctactcatatcccaagcggaggcagccttagagaacctcatagtactcaatgcagcatctctggccgggacgcaaggtcttgtatctttcctcgtgttcttctgctttgcgtggtacctgaagggtaggtgggtgcctggagtggcctacgccctctacgggatgtggccctcctcctgctcctgttggcgttgccccagcgggcatacgcgttggacacggaggtggccgcgtcgtgtggcggtgctgtcctcgtcgggttaatggcgctgactctgtcaccatattacaagcactatatcagctggtgcttgtggtggcttcagtattttctgaccagagtagaagcgcagctgcacgtgtgggttccccccctcaacgttcgagggggcgtgacgccatcatcttactcatgtgtgccgtacacccgactctggtatttgacatctccaaactactgctggctgtcttcgggcccctctggattcttcaagccagtttgcttaaagtaccctactttgtgcgcgtccaaggccttctccgggtctgcgcgctagcgcggaagatggctggaggtcattacgtgcaaatggctatcatcaagttggggcgcttactggcacctatattttcaatcatctcactcctcttcgggactgggcgcacaacggcctacgtgatctggccgtggccgtagaaccagtcaccttctcccaaatggagaccaagctcatcacgtggggggcggacactgccgcctgcggtgacatcatcaacggcttgcccgtctccgcccgtaggggccgggagatattgcttgggccgccgatgggatggtctccaaggggtggaggctgctggcacccatcacggcatacgcccagcagacgaggggccttctagggtgtataatcaccagcttaactggccgggacaagaaccaagtggagggtgaggtccagattatatcaactgccactcaaaccttcttggcaacgtgcatcaatggggtatgctggactgtctaccacggggccggaacaggaccatcgcatcacccaagggtcctgttattcagatgtataccaatgtagaccaagaccttgtgggttggcccgccccttcaggtgcccgctcgttgacgccctgcacttgcggctcctcggacctctacctggtcacgaggcacgccgatgtcattcccgtgcgccggcggggtgatagcaggggcagcctgctttcgccccggcccatttcctattgaaaggctcctcggggggtccactgttgtgccccgcggggcacgccgtgggcatatttagggccgcggtgtgcacccgtggagtggctaaggcggtggacttcatccctgtggagaacctagagacaaccatgaggtccccggtgttcacggacaactcctctccaccagcagtgccccagagcttccaggtggcccacctgcatgctcccacaggagcggcaagagcaccaaggtcccggctgcgtacgcagctcagggctataaggtgctagtgctcaacccctctgttgccgcaacactgggctttggtgcctacatgtccaaggcccacgggatcgagcctaacatcaggaccggggtgagaacaattaccactggcagccccatcacgtactccacctacggtaagttccttgccgacggcgggtgctcgggggcgcttatgacataataatttgtgacgagtgccactccacggatgccacatccatcttgggcatcggcactgtccttgatcaggcagagaccgcgggggcgagactggtcgtgctcgccaccgctacccctccgggctccgtcaccgtgccccatcccaacatcgaggaggttgctctgtccaccaccggagagatccctttttacggcaaggcatccccctcgacgcaatcaagggggggaggcatctcatcttctgtcactcaaaaaagaagtgcgacgagctcgccgcaaaactggtcgcattgggcgttaatgccgtggcctactaccgcggtcttgacgtgtctgtcatcccgaccagcggcgacgttgtcgtcgtggcaaccgatgctctcatgaccggctatactggcgacttcgattcggtgatgactgtaacacgtgtgtcacccagacagtcgatttcagccttgaccctacctttaccatcgagacaaccacgcttccccaggacgctgtctcccgcactcaacgtcggggcaggactggcagggggaagccaggcatctacagatttgtggcaccgggagagcgcccctccggcatgttcgactcgtccgtcctctgtgagtgctatgacgcaggctggcttggtatgagctcacgcccgctgagactacagttaggctacgagcgtacatgaacaccccggggctccccgtgtgccaagaccatcttgaattttgggagggcgtctttacaggtctcactcacatagacgcccacttcctatcccagacaaagcagagtggggagaaccttccttacctggtagcgtaccaagccaccgtgtgcgctagggctcagcccctcccccatcgtgggaccagatgtggaaatgtttgacccgcctcaagcccactctccatggaccaacgcccctgctatacagactgggcgctgtgcagaatgaggtcaccctgacgcatccagtcaccaaatacatcatgacatgca

SEQ ID NO: 751 - DNA, 4856 bp, Hepatitis C virus
gcggtcagatcgttggtggagtttacttgttgccgcgcaggggccctagattgggtgtgcgcgcgacgaggaagacttccgagcggtcgcaacctcgaggtagacgtcagcctatccccaaggcacgcggcccgagggcaggacctgggctcagcccgggtatcctaggcccctctatggcaatgagggctgcgggtgggcgggatggctcctgtctccccgcggctctcggcctagttggggccccacggacccccggcgtaggtcgcgcaatttgggtaaggtcatcgatacccttacgtgcggcttcgccgacctcatggggtacataccgctcgtcggcgccctctcggaggcgctgccagggccctggcgcatggcgtccgggtcctggaagacggcgtgaactatgcaacagggaatcttcctggttgctctttctctatcttcctcctggccctgctctcttgtctgaccgtgcccgcttcagcctaccaagtgcgcaactccacggggctctaccatgtcaccaatgattgccctaattcgagtattgtgttcgagcgcacgatgttatcctgcacactccggggtgtgtcccttgcgtccgcgagggtaacgtctcgaggtgctgggtggcgctgacccccacggtggccaccagggatggcaacctccccgcgacgcaaattcgacgtcacatcgatctgcttgtcgggagtgccaccctttgttcggccctctacgtgggggacctgtgcgggtctgtctttcttatcggcaactgtttaccttctctcccaggcgtcactggacgacgcaagactgcaactgctctatgtatcccggccacataacgggtcaccgcatggcatgggacatgatgatgaactggtctcctacgacggcgttggtagtggctcagctgctccggatcccacaagccatcttggacatgatcgctggtgctcactggggagtcctggcgggcatggcgtattctccatggtggggaactgggcgaaggttctggtagtgctgctgctatttgccggcgtcgacgcggaaacccacgtcaccgggggagctgtcgcccacgccgcgtatgggatccaggctggtctcagtaatttcttcaaggcaggccccaaacagaacatccagctgatcaacaccaacaacagttggcacatcaatcgcacagccttgaactgtaagatagccttgacaccggctggatagcagggcttttctattatcacaatttcaactcttcaggctgtcccgagaggttggccagctgccgacgccttaccgattttagccagggctggggccctatcagtcatgccaacggaagcggccctgaccaacgcccctactgctggcactactccccaaaaccttgcggtgttgtgcccgcgagcaccgtgtgggcccggtatattgcttcactcccagccctgtggtggtgggaacgaccgacagacggggcgcgcccacctacaactggggtgcacgggaggaggacgtcttcgtccttaacaacaccaggccaccgctgggcaattggttcggttgcatctggatgaactcatctggattcaccaaagcttgcggagcgcctccctgcgtcatcggaggggtgggcaaaacaccttgcactgccccactgattgtttccgcaagcacccagaagctacatactctcggtgcggttctggcccctggattacacccaggtgcctggtcaactacccgtataggctttggcactatccttgtaccatcaactacaccttattcaaagtcaggatgtatgtgggaggggtcgagcacaggctggatgctgcttgcaactggacgcgggggaacgttgtgatctggaagacagggacaggtccgagcttagcccgttgttgctgtccactacacagtggcaggtccttccgtgttcattcacgaccctgccagccttgtccaccggcctcatccacctccaccagaacatcgtggacgtgcagtacctctacggggtggggtcaagcatcgtgtcctgggccatcaagtgggagtacgtcgttctcctttccttctgctcgcagatgcacgtgtctgctcctgcttgtggatgatgctactcatatcccaagcggaggcagccttagagaacctcatagtactcaatgcagcatctctggccgggacgcaaggtcttgtatctttcctcgtgttcttctgctttgcgtggtacctgaagggtaggtgggtgcccggagtggcctacgccctctacgggatgtggccctcctcctgctcctgttggcgttgccccagcgggcatacgcgttggacacggaggtggccgcgtcgtgtggcggtgctgtcctcgtcgggttaatggcgctgactctgtcaccatattacaagcactatatcagctggtgcttgtggtggcttcagtattttctgaccagagtagaagcgcagctgcacgtgtgggttccccccctcaacgttcgagggggcgtgacgccatcatcttactcatgtgtgccgtacacccgactctggtatttgacatctccaaactactgctggctgtcttcgggcccctctggattcttcaagccagtttgcttaaagtaccctactttgtgcgcgtccaaggccttctccgggtctgcgcgctagcgcggaagatggctggaggtcattacgtgcaaatggctatcatcaagttggggcgcttactggcacctatattttcaatcatctcactcctcttcgggactgggcgcacaacggcctacgtgatctggccgtggccgtagaaccagtcaccttctcccaaatggagaccaagctcatcacgtggggggcggacactgccgcctgcggtgacatcatcaacggcttgcccgtctccgcccgtaggggccgggagatattgcttgggccgccgatgggatggtctccaaggggtggaggctgctggcacccatcacggcatacgcccagcagacgaggggccttctagggtgtataatcaccagcttaactggccgggacaagaaccaagtggagggtgaggtccagattatatcaactgccactcaaaccttcttggcaacgtgcatcaatggggtatgctggactgtctaccacggggccggaacaggaccatcgcatcacccaagggtcctgttattcagatgtataccaatgtagaccaagaccttgtgggttggcccgccccttcaggtgcccgctcgttgacgccctgcacttgcggctcctcggacctttacctggtcacgaggcacgccgatgtcattcccgtgcgccggcggggtgatagcaggggcagcctgctttcgccccggcccatttcctattgaaaggctcctcggggggtccactgttgtgccccgcggggcacgccgtgggcatatttagggccgcggtgtgcacccgtggagtggctaaggcggtggacttcatccctgtggagaacctagagacaaccatgaggtccccggtgttcacggacaactcctctccaccagcagtgccccagagcttccaggtggcccacctgcatgctcccacaggagcggcaagagcaccaaggtcccggctgcgtacgcagctcagggctataaggtgctagtgctcaacccctctgttgccgcaacactgggctttggtgcctacatgtccaaggcccacgggatcgagcctaacatcaggaccggggtgagaacaattaccactggcagccccatcacgtactccacctacggtaagttccttgccgacggcgggtgctcgggggcgcttatgacataataatttgtgacgagtgccactccacggatgccacatccatcttgggcatcggcactgtccttgatcaggcagagaccgcgggggcgagactggtcgtgctcgccaccgctacccctccgggctccgtcaccgtgccccatcccaacatcgaggaggttgctctgtccaccaccggagagatccctttttacggcaaggcatccccctcgacgcaatcaagggggggaggcatctcatcttctgtcactcaaaaaagaagtgcgacgagctcgccgcaaaactggtcgcattgggcgttaatgccgtggcctactaccgcggtcttgacgtgtctgtcatcccgaccagcggcgacgttgtcgtcgtggcaaccgatgctctcatgaccggctatactggcgacttcgattcggtgatgactgtaacacgtgtgtcacccagacagtcgatttcagccttgaccctacctttaccatcgagacaaccacgcttccccaggacgctgtctcccgcactcaacgtcggggcaggactggcagggggaagccaggcatctacagatttgtggcaccgggagagcgcccctccggcatgttcgactcgtccgtcctctgtgagtgctatgacgcaggctggcttggtatgagctcacgcccgctgagattacagttaggctacgagcgtacatgaacaccccggggctccccgtgtgccaagaccatcttgaattttgggagggcgtctttacaggtctcactcacatagacgcccacttcctatcccagacaaagcagagtggggagaactttccttacctggtagcgtaccaagccaccgtgtgcgctagggctcagcccctcccccatcgtgggaccagatgtggaaatgtttgacccgcctcaagcccactctccatggaccaacgcccctgctatacagactgggcgctgtgcagaatgaggtcaccctgacgcatccagtcaccaaatacatcatgacatgca

SEQ ID NO: 752 - DNA, 4856 bp, Hepatitis C virus
gcggtcagatcgttggtggagtttacttgttgccgcgcaggggccctagattgggtgtgcgcgcgacgaggaagacttccgagcggtcgcaacctcgaggtagacgtcagcctatccccaaggcacgcggcccgagggcaggacctgggctcagcccgggtatcctaggcccctctatggcaatgagggctgcgggtgggcgggatggctcctgtctccccgcggctctcggcctagttggggccccacggacccccggcgtaggtcgcgcaatttgggtaaggtcatcgatacccttacgtgcggcttcgccgacctcatggggtacataccgctcgtcggcgccctctcggaggcgctgccagggccctggcgcatggcgtccgggtcctggaagacggcgtgaactatgcaacagggaatcttcctggttgctctttctctatcttcctcctggccctgctctcttgtctgaccgtgcccgcttcagcctaccaagtgcgcaactccacggggctctaccatgtcaccaatgattgccctaattcgagtattgtgttcgagcgcacgatgttatcctgcacactccggggtgtgtcccttgcgttcgcgagggtaacgtctcgaggtgctgggtggcgctgacccccacggtggctaccagggatggcaacctccccgcgacgcaaattcgacgtcacatcgatctgcttgtcgggagtgccaccctttgttcggccctctacgtgggggacctgtgcgggtctgtctttcttatcggcaactgtttaccttctctcccaggcgtcactggacgacgcaagactgcaattgctctatgtatcccggccacataacgggtcaccgcatggcatgggacatgatgatgaactggtctcctacgacggcgttggtagtggctcaactgctccggatcccacaagccatcttggacatgatcgctggtgctcactggggagtcctggcgggcatagcgtattctccatggtggggaactgggcgaaggttctggtagtgctgctgctatttgccggcgtcgacgcggaaacccacgtcaccgggggagctgtcgcccacgccgcgtatgggatccaggctggtctcagtaatttcttcaaggcaggccccaaacagaacatccagctgatcaacaccaacaacagttggcacatcaatcgcacggccttgaactgtaagacagccttgacaccggctggatagcagggcttttctattatcacaatttcaactcttcaggctgttccgagaggttggccagctgccgacgccttaccgattttggccagggctggggccctatcagttatgccaacggaagcggccctgaccaacgcccctattgctggcactactccccaaaaccttgcggtgttgtgcccgcgagcaccgtgtgggcccggtatattgcttcactcccagccctgtggtggtgggaacgaccgacaaacggggcgcgcccacctacaactggggtacacgggaggaggacgtcttcgtccttaacaacaccaggccaccgctgggcaattggttcggttgcatctggatgaactcatctggattcaccaaagcttgcggagcgcctccctgcgtcatcggaggggtgggcaaaacaccttgcactgccccactgattgtttccgcaagcacccggaagctacatactctcggtgcggctctggcccctggattacacccaggtgcttggtcaactacccgtataggctttggcattatccttgtaccatcaactacaccttattcaaagtcaggatgtatgtgggaggggtcgagcacaggctggatgctgcttgcaactggacgcgggggaacgttgtgatctggaagacagggacaggtccgagcttagcccgttgttgctgtccactacacagtggcaggtccttccgtgttcattcacgaccctgccagccttgtccaccggcctcatccacctccaccagaacatcgtggacgtgcagtacctctacggggtggggtcaagcatcgtgtcctgggccatcaagtgggagtacgtcgttctcctttcctcctgcttgcagatgcacgtgtctgctcctgcttgtggatgatgctactcatatcccaagcggaggcagccttagagaacctcatagtactcaatgcagcatctctggccgggacgcaaggtcttgtatctttcctcgtgttcttctgctttgcgtggtacctgaagggtaggtgggtgcccggagtggcctacgccctctacgggatgtggccctcctcctgctcctgttggcgttgccccagcgggcatacgcgttggacacggaggtggccgcgtcgtgtggcggtgctgtcctcgtcgggttaatggcgctgactctgtcaccatattacaagcactatatcagctggtgcttgtggtggcttcagtattttctgaccagagtagaagcgcagctgcacgtgtgggttccccccctcaacgttcgagggggcgtgacgccatcatcttactcatgtgtgccgtacacccgactctggtatttgacatctccaaactactgctggccgtcttcgggcccctctggattcttcaagccagtttgcttaaagtaccctactttgtgcgcgtccaaggccttctccgggtctgcgcgctagcgcggaagatggctggaggtcattacgtgcaaatggctatcatcaagttggggcgcttactggcacctatatttacaatcatctcactcctcttcgggactgggcgcacaacggcctacgtgatctggccgtggccgtggaaccagtcaccttctcccaaatggagaccaagcttatcacgtggggggcggacactgccgcctgcggtgacatcatcaacggcttgcccgtctccgcccgtaggggccgggagatattgcttgggccgccgacgggatggtctccaaggggtggaggctgctggcacccatcacggcatacgcccagcagacgaggggccttctagggtgcataatcaccagcttaactggccgggacaagaaccaagtggagggtgaggtccagattatatcaactgccactcaaaccttcttggcaacgtgcatcaatggggtatgctggactgtctaccacggggccggaacaggaccatcgcatcacccaagggtcctgttattcagatgtataccaatgtagaccaagaccttgtgggttggcccgcccccccaggtgcccgctcgttgacgccctgcacttgcggctcctcggacctttacctggtcacgaggcacgccgatgtcattcccgtgcgccggcggggtgatagcaggggcagcctgctttcgccccggcccatttcctattgaaaggctcctcggggggtccactgttgtgccccgcggggcacgccgtgggcatatttagggccgcggtgtgcacccgtggagtggctaaggcggtggacttcatccctgtggagaacctagagacaaccatgaggtctccggtgttcacggacaactcctctccaccagcagtgccccagagcttccaggtggcccacctgcatgctcccacaggagcggcaagagcaccaaggtcccggctgcatacgcagctcagggctataaggtgctagtgcttaacccctctgttgctgcaacactgggctttggtgcctacatgtccaaggcccacgggatcgagcctaacatcaggaccggggtgagaacaattaccactggcagccccatcacgtactccacctacggtaagttccttgccgacggcgggtgctcgggggcgcttatgacataataatttgtgacgagtgccactccacggatgccacatccatcttgggcatcggcactgtccttgatcaggcagagaccgcgggggcgagactggtcgtgctcgccaccgctacccctccgggctccgtcaccgtgccccatcccaacatcgaggaggttgctctgtccaccaccggagagatccctttttacggcaaggcatcccccttgacgcaatcaagggggggaggcatctcatcttctgccactcaaaaaagaagtgcgacgagctcgccgcaaaactggtcgcattgggcgttaatgccgtggcctactaccgcggtcttgacgtgtctgtcatcccgaccagcggcgacgttgtcgtcgtggcaaccgatgctctcatgaccggctatactggcgacttcgattcggtggtgactgtaacacgtgtgtcacccagacagtcgatttcagccttgaccctacctttaccatcgagacaaccacgcttccccaggacgctgtctcccgcactcaacgtcggggcaggactggcagggggaagccaggcatctacagatttgtggcaccgggagagcgcccctccggcatgttcgactcgtccgtcctctgtgagtgctatgacgcaggctggcttggtatgagctcacgcccgctgagactacagttaggctacgagcgtacatgaacaccccggggctccccgtgtgccaagaccatcttgaattttgggagggcgtctttacaggtctcactcatatagacgcccacttcctatcccagacaaagcagagtggggagaaccttccttacctggtagcgtaccaagccaccgtgtgcgctagggctcagcccctcccccatcgtgggaccagatgtggaaatgtttgacccgcctcaagcccactctccatggaccaacgcccctgctatacagactgggcgctgtgcagaatgaggtcaccctgacgcatccagtcaccaaatacatcatgacatgca

SEQ ID NO: 753 - DNA, 4856 bp, Hepatitis C virus
gcggtcagatcgttggtggagtttacttgttgccgcgcaggggccctagattgggtgtgcgcgcgacgaggaagacttccgagcggtcgcaacctcgaggtagacgtcagcctatccccaaggcacgcggcccgagggcaggacctgggctcagcccggatatcctaggcccctctatggcaatgagggctgcgggtgggcgggatggctcctgtctccccgcggctctcggcctagttggggccccacggacccccggcgtaggtcgcgcaatttgggtaaggtcatcgatacccttacgtgcggcttcgccgacctcatggggtacataccgctcgtcggcgccctctcggaggcgctgccagggccctggcgcatggcgtccgggtcctggaagacggcgtgaactatgcaacagggaatcttcctggttgctctttctctatcttcctcctggccctgctctcttgtctgaccgtgcccgcttcagcctaccaagtgcgcaactccacggggctctaccatgtcaccaatgattgccctaattcgagtattgtgttcgagcgcacgatgttatcctgcacactccggggtgtgtcccttgcgttcgcgagggtaacgtctcgaggtgctgggtggcgctgacccccacggtggccaccagggatggcaacctccccgcgacgcaaattcgacgtcacatcgatctgcttgtcgggagtgccaccctttgttcggccctctacgtgggggacctgtgcgggtctgtctttcttatcggcaactgtttaccttctctcccaggcgtcactggacgacgcaagactgcaactgctctatgtatcccggccacataacgggtcaccgcatggcatgggacatgatgatgaactggtctcctacgacggcgttggtagtggctcagctgctccggatcccacaagccatcttggacatgatcgctggtgctcactggggagtcctggcgggcatggcgtattctccatggtggggaactgggcgaaggttctggtagtgctgctgctatttgccggcgtcgacgcggaaacccacgtcaccgggggagctgtcgcccacgccgcgtatgggatccaggctggtctcagtaatttcttcaaggcaggccccaaacagaacatccagctgatcaacaccaacaacagttggcacatcaatcgcacagccttgaactgtaagatagccttgacaccggctggatagcagggcttttctattatcacaatttcaactcttcaggctgtcccgagaggttggccagctgccgacgccttaccgattttagccagggctggggccctatcagtcatgccaacggaagcggccctgaccaacgcccctactgctggcactactccccaaaaccttgcggtgttgtgcccgcgagcaccgtgtgggcccggtatattgcttcactcccagccctgtggtggtgggaacgaccgacagacggggcgcgcccacctacaactggggtacacaggaggaggacgtcttcgtccttaacaacaccaggccaccgctgggcaattggttcggttgcatctggatgaactcatctggattcaccaaagcttgcggagcgcctccctgcgtcatcggaggggtgggcaaaacaccttgcactgccccactgattgtttccgcaagcacccagaagctacatactctcggtgcggttctggcccctggattacacccaggtgcctggtcaactacccgtataggctttggcactatccttgtaccatcaactacaccttattcaaagtcaggatgtatgtgggaggggtcgagcacaggctggatgctgcttgcaactggacgcgggggaacgttgtgatctggaagacagggacaggtccgagcttagcccgttgttgctgtccactacacagtggcaggtacttccgtgttcattcacgaccctgccagccttgtccaccggcctcatccacctccaccagaacatcgtggacgtgcagtacctctacggggtggggtcaagcatcgtgtcctgggccatcaagtgggagtacgtcgttctcctttccttctgcttgcagatgcacgtgtctgctcctgcttgtggatgatgctactcatatcccaagcggaggcagccttagagaacctcatagtactcaatgcagcatctctggccgggacgcaaggtcttgtatctttcctcgtgttcttctgctttgcgtggtgcctgaagggtaggtgggtgcccggagtggcctatgccctctacgggatgtggccctcctcctgctcctgttggcgttgccccagcgggcatacgcgttggacacggaggtggccgcgtcgtgtggcggtgctgtcctcgtcgggttaatggcgctgactctgtcaccatattacaagcactatatcagctggtgcttgtggtggcttcagtattttctgaccagagtagaagcgcagctgcacgtgtgggttccccccctcaacgttcgagggggcgtgacgccatcatcttactcatgtgtgccgtacacccgactctggtatttgacatctccaaactactgctggctgtcttcggacccctctggattcttcaagccagtttgcttaaagtaccctactttgtgcgcgtccaaggccttctccgggtctgcgcgctagcgcggaagatggctggaggtcactacgtgcaaatggctatcatcaagttggggcgcttactggcacctatattttcaatcatctcactcctcttcgggactgggcgcacaacggcctacgtgatctggccgtggccgtagaaccagtcaccttctcccaaatggagaccaagctcatcacgtggggggcggacactgccgcctgcggtgacatcatcaacggcttgcccgtctccgcccgtaggggccgggagatattgcttgggccgccgatgggatggtctccaaggggtggaggctgctggcacccatcacggcatacgcccagcagacgaggggccttctagggtgtataatcaccagcttaactggccgggacaagaaccaagtggagggtgaggtccagattatatcaactgccactcaaaccttcttggcaacgtgcatcaatggggtatgctggactgtctaccacggggccggaacaggaccatcgcatcacccaagggtcctgtcattcagatgtataccaatgtagaccaagaccttgtgggttggcccgccccttcaggtgcccgctcgttgacgccctgcacttgcggctcctcggacctttacctggtcacgaggcacgccgatgtcattcccgtgcgccggcggggtgatagcaggggcagcctgctttcgccccggcccatttcctattgaaaggctcctcggggggtccactgttgtgccccgcggggcacgccgtgggcatatttagggccgcggtgtgcacccgtggagtggctaaggcggtggacttcatccctgtggagaacctagagacaaccatgaggtccccggtgttcacggacaactcctctccaccagcagtgccccagagcttccaggtggcccacctgcatgctcccacaggagcggcaagagcaccaaggtcccggctgcgtacgcagctcagggctataaggtgctagtgctcaacccctctgttgccgcaacactgggctttggtgcctacatgtccaaggcccacgggatcgagcctaacatcaggaccggggtgagaacaattaccactggcagccccatcacgtactccacctacggtaagttccttgccgacggcgggtgctcgggggcgcttatgacataataatttgtgacgagtgccactccacggatgccacatccatcttgggcatcggcactgtccttgatcaggcagagaccgcgggggcgagactggtcgtgctcgccaccgctacccctccgggctccgtcaccgtgccccatcccaacatcgaggaggttgctctgtccaccaccggagagatccctttttacggcaaggcatccccctcgacgcaatcaagggggggaggcatctcatcttctgtcactcaaaaaagaagtgcgacgagctcgccgcaaaactggtcgcattgggcgttaatgccgtggcctactaccgcggtcttgacgtgtctgtcatcccgaccagcggcgacgttgtcgtcgtggcaaccgatgctctcatgaccggctatactggcgacttcgattcggtgatgactgtaacacgtgtgtcacccagacagtcgatttcagccttgaccctacctttaccatcgagacaaccacgcttccccaggacgctgtctcccgcactcaacgtcggggcaggactggcagggggaagccaggcatctacagatttgtggcaccgggagagcgcccctccggcatgttcgactcgtccgtcctctgtgagtgctatgacgcaggctggcttggtatgagctcacgcccgctgagactacagttaggctacgagcgtacatgaacaccccggggctccccgtgtgccaagaccatcttgaattttgggagggcgtctttacaggtctcactcacatagacgcccacttcctatcccagacaaagcagagtggggagaaccttccttacctggtagcgtaccaagccaccgtgtgcgctagggctcagcccctcccccatcgtgggaccagatgtggaaatgtttgacccgcctcaagcccactctccatggaccaacgcccctgctatacagactgggcgctgtgcagaatgaggtcaccctgacgcatccagtcaccaaatacatcatgacatgca

SEQ ID NO: 754 - DNA, 4856 bp, Hepatitis C virus
gcggtcagatcgttggtggagtttacttgttgccgcgcaggggccctagattgggtgtgcgcgcgacgaggaagacttccgagcggtcgcaacctcgaggtagacgtcagcctatccccaaggcacgcggcccgagggcaggacctgggctcagcccgggtatcctaggcccctctatggcaatgagggctgcgggtgggcgggatggctcctgtctccccgcggctctcggcctagttggggccccacggacccccggcgtaggtcgcgcaatttgggtaaggtcatcgatacccttacgtgcggcttcgccgacctcatggggtacataccgctcgtcggcgccctctcggaggcgctgccagggccctggcgcatggcgtccgggtcctggaagacggcgtgaactatgcaacagggaatcttcctggttgctctttctctatcttcctcctggccctgctctcttgtctgaccgtgcccgcttcagcctaccaagtgcgcaactccacggggctctaccatgtcaccaatgattgccctaattcgagtattgtgttcgagcgcacgatgttatcctgcacactccggggtgtgtcccttgcgttcgcgagggtaacgtctcgaggtgctgggtggcgctgacccccacggtggccaccagggatggcaacctccccgcgacgcaaattcgacgtcacatcgatctgcttgtcgggagtgccaccctttgttcggccctctacgtgggggacctgtgcgggtctgtctcccttatcggcaactgtttaccttctctcccaggcgtcactggacgacgcaagactgcaactgctctatgtatcccggccacataacgggtcaccgcatggcatgggacatgatgatgaactggtctcctacgacggcgttggtagtggctcagctgctccggatcccacaagccatcttggacatgatcgctggtgctcactggggagtcctggcgggcatggcgtattctccatggtggggaactgggcgaaggttctggtagtgctgctgctatttgccggcgtcgacgcggaaacccacgtcaccgggggagctgtcgcccacgccgcgtatgggatccaggctggtctcagtaatttcttcaaggcaggccccaaacagaacatccagctgatcaacaccaacaacagttggcacatcaatcgcacagccttgaactgtaagatagccttgacaccggctggatagcagggcttttctattatcacaatttcaactcttcaggctgtcccgagaggttggccagctgccgacgccttaccgattttagccagggctggggccctatcagtcatgccaacggaagcggccctgaccaacgcccctactgctggcactactccccaaaaccttgcggtgttgtgcccgcgagcaccgtgtgggcccggtatattgcttcactcccagccctgtggtggtgggaacgaccgacagacggggcgcgcccacctacaactggggtacacaggaggaggacgtcttcgtccttaacaacaccaggccaccgctgggcaattggttcggttgcatctggatgaactcatctggattcaccaaagcttgcggagcgcctccctgcgtcatcggaggggtgggcaaaacaccttgcactgccccactgattgtttccgcaagcacccagaagctacatactctcggtgcggttctggcccctggattacacccaggtgcctggtcaactacccgtataggctttggcactatccttgtaccatcaactacaccttattcaaagtcaggatgtatgtgggaggggtcgagcacaggctggatgctgcttgcaactggacgcgggggaacgttgtgatctggaagacagggacaggtccgagcttagcccgttgttgctgtccactacacagtggcaggtccttccgtgttcattcacgaccctgccagccttgtccaccggcctcatccacctccaccagaacatcgtggacgtgcagtacctctacggggtggggtcaagcatcgtgtcctgggccatcaagtgggagtacgtcgttctcctttccttctgcttgcagatgcacgtgtctgctcctgcttgtggatgatgctactcatatcccaagcggaggcagccttagagaacctcatagtactcaatgcagcatctctggccgggacgcaaggtcttgtatctttcctcgtgttcttctgctttgcgtggtacctgaagggtaggtgggtgcccggagtggcctacgccctctacgggatgtggccctcctcctgctcctgttggcgttgccccagcgggcatacgcgttggacacggaggtggccgcgtcgtgtggcggtgctgtcctcgtcgggttaatggcgctgactctgtcaccatattacaagcactatatcagctggtgcttgtggtggcttcagtattttctgaccagagtagaagcgcagctgcacgtgtgggttccccccctcaacgttcgagggggcgtgacgccatcatcttactcatgtgtgccgtacacccgactctggtatttgacatctccaaactactgctggctgtcttcgggcccctctggattcttcaagccagtttgcttaaagtaccctactttgtgcgcgtccaaggccttctccgggtctgcgcgctagcgcggaagatggctggaggtcattacgtgcaaatggctatcatcaagttggggcgcttactggcacctatattttcaatcatctcactcctcttcgggactgggcgcacaacggcctacgtgatctggccgtggccgtagaaccagtcaccttctcccaaatggagaccaagctcatcacgtggggggcggacactgccgcctgcggtgacatcatcaacggcttgcccgtctccgcccgtaggggccgggagatattgcttgggccgccgatgggatggtctccaaggggtggaggctgctggcacccatcacggcatacgcccagcagacgaggggccttctagggtgtataatcaccagcttaactggccgggacaagaaccaagtggagggtgaggtccagattatatcaactgccactcaaactttcttggcaacgtgcatcaatggggtatgctggactgtctaccacggggccggaacaggaccatcgcatcacccaagggtcctgtcattcagatgtataccaatgtagaccaagaccttgtgggttggcccgccccttcaggtgcccgctcgttgacgccctgcacttgcggctcctcggacctttacctggtcacgaggcacgccgatgtcattcccgtgcgccggcggggtgatagcaggggcagcctgctttcgccccggcccatttcctattgaaaggctcctcggggggtccactgttgtgccccgcggggcacgccgtgggcatatttagggccgcggtgtgcacccgtggcgtggctaaggcggtggacttcatccctgtggagaacctagagacaaccatgaggtccccggtgttcacggacaactcctctccaccagcagtgccccagagcttccaggtggcccacctgcatgctcccacaggagcggcaagagcaccaaggtcccggctgcgtacgcagctcagggctataaggtgctagtgctcaacccctctgttgccgcaacactgggctttggtgcctacatgtccaaggcccacgggatcgagcctaacatcaggaccggggtgagaacaattaccactggcagccccatcacgtactccacctacggtaagttccttgccgacggcgggtgctcgggggcgcttatgacataataatttgtgacgagtgccactccacggatgccacatccatcttgggcatcggcactgtccttgatcaggcagagaccgcgggggcgagactggtcgtgctcgccaccgctacccctccgggctccgtcaccgtgccccatcccaacatcgaggaggttgctctgtccaccaccggagagatccctttttacggcaaggcatccccctcgacgcaatcaagggggggaggcatctcatcttctgtcactcaaaaaagaagtgcgacgagctcgccgcaaaactggtcgcattgggcgttaatgccgtggcctactaccgcggtcttgacgtgtctgtcatcccgaccagcggcgacgttgtcgtcgtggcaaccgatgctctcatgaccggctatactggcgacttcgattcggtgatgactgtaacacgtgtgtcacccagacagtcgatttcagccttgaccctacctttaccatcgagacaaccacgcttccccaggacgctgtctcccgcactcaacgtcggggcaggactggcagggggaagccaggcatctacagatttgtggcaccgggagagcgcccctccggcatgttcgactcgtccgtcctctgtgagtgctatgacgcaggctggcttggtatgagctcacgcccgctgagactacagttaggctacgagcgtacatgaacaccccggggctccccgtgtgccaagaccatcttgaattttgggagggcgtctttacaggtctcactcacatagacgcccacttcctatcccagacaaagcagagtggggagaaccttccttacctggtagcgtaccaagccaccgtgtgcgctagggcccagcccctcccccatcgtgggaccagatgtggaaatgtttgacccgcctcaagcccactctccatggaccaacgcccctgctatacagactgggcgctgtgcagaatgaggtcaccctgacgcatccagtcaccaaatacatcatgacatgca

SEQ ID NO: 755 - DNA, 4856 bp, Hepatitis C virus
gcggtcagatcgttggtggagtttacttgttgccgcgcaggggccctagattgggtgtgcgcgcgacgaggaagacttccgagcggtcgcaacctcgaggtagacgtcagcctatccccaaggcacgcggcccgagggcaggacctgggctcagcccggatatcctaggcccctctatggcaatgagggctgcgggtgggcgggatggctcctgtctccccgcggctctcggcctagttggggccccacggacccccggcgtaggtcgcgcaatttgggtaaggtcatcgatacccttacgtgcggcttcgccgacctcatggggtacataccgctcgtcggcgccctctcggaggcgctgccagggccctggcgcatagcgtccgggtcctggaagacggcgtgaactatgcaacagggaatcttcctggttgctctttctctatcttcctcctggccctgctctcttgtctgaccgtgcccgcttcagcctaccaagtgcgcaacaccacggggctctaccatgtcaccaatgattgccctaattcgagtattgtgttcgagcgcacgatgttatcctgcacactccggggtgtgtcccttgcgttcgcgagggtaacgtctcgaggtgctgggtggcgctgacccccacggtggccaccagggatggcaacctccccgcgacgcaaattcgacgtcacatcgatctgcttgtcgggagtgccaccctttgttcggccctctacgtgggggacctgtgcgggtctgtctttcttatcggcaactgtttaccttctctcccaggcgtcactggacgacgcaagactgcaactgctctatgtatcccggccacataacgggtcaccgcatggcatgggacatgatgatgaactggtctcctacgacggcgttggtagtggctcagctgctccggatcccacaagccatcttggacatgatcgctggtgctcactggggagtcctggcgggcatggcgtattctccatggtggggaactgggcgaaggttctggtagtgctgctgctatttgccggcgtcgacgcggaaacccacgtcaccgggggagctgtcgcccacgccgcgtatgggatccaggctggtctcagtaatttcttcaaggcaggccccaaacagaacatccagctgatcaacaccaacaacagttggcacatcaatcgcacagccttgaactgtaagatagccttgacaccggctggatagcagggcttttctattatcacaatttcaactcttcaggctgtcccgagaggttggccagctgccgacgccttaccgattttagccagggctggggccctatcagtcatgccaacggaagcggccctgaccaacgcccctactgctggcactactccccaaaaccttgcggtgttgtgcccgcgagcaccgtgtgggcccggtatattgcttcactcccagccctgtggtggtgggaacgaccgacagacggggcgcgcccacctacaactggggtacacgggaggaggacgtcttcgtccttaacaacaccaggccaccgctgggcaattggttcggttgcatctggatgaactcatctggattcaccaaagcttgcggagcgcctccctgcgtcatcggaggggtgggcaaaacaccttgcactgccccacagattgtttccgcaagcacccagaagctacatactctcggtgcggttctggcccctggattacacccaggtgcctggtcaactacccgtataggctttggcactatccttgtaccatcaactacaccttattcaaagtcaggatgtatgtgggaggggtcgagcacaggctggatgctgcttgcaactggacgcgggggaacgttgtgatctggaagacagggacaggtccgagcttagcccgttgttgctgtccactacacagtggcaggtccttccgtgttcattcacgaccctgccagccttgtccaccggcctcatccacctccaccagaacatcgtggacgtgcagtacctctacggggtggggtcaagcatcgtgtcctgggccatcaagtgggagtacgtcgttctccttttcttctgcttgcagatgcacgtgtctgctcctgcttgtggatgatgctactcatatcccaagcggaggcagccttagagaacctcatagtactcaatgcagcatctctggccgggacgcaaggtcttgtatctttcctcgtgttcttctgctttgcgtggtacctgaagggtaggtgggtgcccggagtggcctacgccctctacgggatgtggccctcctcctgctcctgttggcgttgccccagcgggcatacgcgttggacacggaggtggccgcgtcgtgtggcggtgctgtcctcgtcgggttaatggcgctgactctgtcaccatattacaagcactatatcagctggtgcttgtggtggcttcagtattttctgaccagagtagaagcgcagctgcacgtgtgggttccccccctcaacgttcgagggggcgtgacgccatcatcttactcatgtgtgccgtacacccgactctggtatttgacatctccaaactactgctggctgtcttcgggcccctctggattcttcaagccagtttgcttaaagtaccctactttgtgcgcgtccaaggccttctccgggtctgcgcgctagcgcggaagatggctggaggtcattacgtgcaaatggctatcatcaagttggggcgcttactggcacctatattttcaatcatctcactcctcttcgggactgggcgcacaacggcctacgtgatctggccgtggccgtagaaccagtcaccttctcccaaatggagaccaagctcatcacgtggggggcggacactgccgcctgcggtgacatcatcaacggcttgcccgtctccgcccgtaggggccgggagatattgcttgggccgccgatgggatggtctccaaggggtggaggctgctggcacccattacggcatacgcccagcagacgaggggccttctagggtgtataatcaccagcttaactggccgggacaagaaccaagtggagggtgaggtccagattatatcaactgccactcaaactttcttggcaacgtgcatcaatggggtatgctggactgtctaccacggggccggaacaggaccatcgcatcacccaagggtcctgttattcagatgtataccaatgtagaccaagaccttgtgggttggcccgccccttcaggtgcccgctcgttgacgccctgcacttgcggctcctcggacctttacctggtcacgaggcacgccgatgtcattcccgtgcgccggcggggtgatagcaggggcagcctgctttcgccccggcccatttcctattgaaaggctcctcggggggtccactgttgtgccccgcggggcacgccgtgggcatatttagggccgcggtgtgcacccgtggagtggctaaggcggtggacttcatccctgtggagaacctagagacaaccatgaggtccccggtgttcacggacaactcctctccaccagcagtgccccagagcttccaggtggcccacctgcatgctcccacaggagcggcaagagcaccaaggtcccggctgcgtacgcagctcagggctataaggtgctagtgctcaacccctctgttgccgcaacactgggctttggtgcctacatgtccaaggcccacgggatcgagcctaacatcaggaccggggtgagaacaattaccactggcagccccatcacgtactccacctacggtaagttccttgccgacggcgggtgctcgggggcgcttatgacataataatttgtgacgagtgccactccacggatgccacatccatcttgggcatcggcactgtccttgatcaggcagagaccgcgggggcgagactggtcgtgctcgccaccgctacccctccgggctccgtcaccgtgccccatcccaacatcgaggaggttgctctgtccaccaccggagagatccctttttacggcaaggcatccccctcgacgcaatcaagggggggaggcatctcatcttctgtcactcaaaaaagaagtgcgacgagctcgccgcaaaactggtcgcattgggcgttaatgccgtggcctactaccgcggtcttgacgtgtctgtcatcccgaccagcggcgacgttgtcgtcgtggcaaccgatgctctcatgaccggctatactggcgacttcgattcggtgatgactgtaacacgtgtgtcacccagacagtcgatttcagccttgaccctacctttaccatcgagacaaccacgcttccccaggacgctgtctcccgcactcaacgtcggggcaggactggcagggggaagccaggcatctacagatttgtggcaccgggagagcgcccctccggcatgttcgactcgtccgtcctctgtgagtgctatgacgcaggctggcttggtatgagctcacgcccgctgagactacagttaggctacgagcgtacatgaacaccccggggctccccgtgtgccaagaccatcttgaattttgggagggcgtctttacaggcctcactcacatagacgcccacttcctatcccagacaaagcagagtggggagaaccttccttacctggtagcgtaccaagccaccgtgtgcgctagggctcagcccctcccccatcgtgggaccagatgtggaaatgtttgacccgcctcaagcccactctccatggaccaacgcccctgctatacagactgggcgctgtgcagaatgaggtcaccctgacgcatccagtcaccaaatacatcatgacatgca

SEQ ID NO: 756 - DNA, 4856 bp, Hepatitis C virus
gcggtcagatcgttggtggagtttacttgttgccgcgcaggggccctagattgggtgtgcgcgcgacgaggaagacttccgagcggtcgcaacctcgaggtagacgccagcctatccccaaggcacgcggcccgagggcaggacctgggctcagcccgggtatcctaggcccctctatggcaatgagggctgcgggtgggcgggatggctcctgtctccccgcggctcccggcctagttggggccccacggacccccggcgtaggtcgcgcaatttgggtaaggtcatcgatacccttacgtgcggcttcgccgacctcatggggtacataccgctcgtcggcgccctctcggaggcgctgccagggccctggcgcatggcgtccgggtcctggaagacggcgtgaactatgcaacagggaatcttcctggttgctctttctctatcttcctcctggccctgctctcttgtctgaccgtgcccgcttcagcctaccaagtgcgcaactccacggggctctaccatgtcaccaatgattgccctaattcgagtattgtgttcgagcgcacgatgttatcctgcacactccggggtgtgtcccttgcgttcgcgagggtaacgtctcgaggtgctgggtggcgctgacccccacggtggccaccagggatggcaacctccccgcgacgcaaattcgacgtcacatcgatttgcttgtcgggagtgccaccctttgttcggccctctacgtgggggacctgtgcgggtctgtctttcttatcggcaactgtttaccttctctcccaggcgtcactggacgacgcaagactgcaactgctctatgtatcccggccacataacgggtcaccgcatggcatgggacatgatgatgaactggtctcctacgacggcgttggtagtggctcagctgctccggatcccacaagccatcttggacatgatcgctggtgctcactggggagtcctggcgggcatggcgtattctccatggtggggaactgggcgaaggttctggtagtgctgctgctatttgccggcgtcgacgcggaaacccacgtcaccgggggagctgtcgcccacgccgcgtatgggatccaggctggtctcagtaatttcttcaaggcaggccccaaacagaacatccagctgatcaacaccaacaacagttggcacatcaatcgcacagccttgaactgtaagatagccttgacaccggctggatagcagggcttttctattatcacaatttcaactcttcaggctgtcccgagaggttggccagctgccgacgccttaccgattttagccagggctggggccctatcagtcatgccaacggaagcggccctgaccaacgcccctactgctggcactactccccaaaaccttgcggtgttgtgcccgcgagcaccgtgtgggcccggtatattgcttcactcccagccctgtggtggtgggaacgaccgacagacggggcgcgcccacctacaactggggtgcacgggaggaggacgtcttcgtccttaacaacaccaggccaccgctgggcaattggttcggttgcatctggatgaactcatctggattcaccaaagcttgcggagcgcctccctgcgtcatcggaggggtgggcaaaacaccttgcactgccccactgattgtttccgcaagcacccagaagctacatactctcggtgcggttctggcccctggattacacccaggtgcctggtcaactacccgtataggctttggcactatccttgtaccatcaattacaccttattcaaagtcaggatgtatgtgggaggggtcgagcacaggctggatgctgcttgcaactggacgcgggggaacgttgtgatctggaagatagggacaggtccgagcttagcccgttgttgctgtccactacacagtggcaggtccttccgtgttcattcacgaccctgccagccttgtccaccggcctcatccacctccaccagaacatcgtggacgtgcagtacctctacggggtggggtcaagcatcgtgtcctgggccatcaagtgggagtacgtcgttctcctttccttctgcttgcagatgcacgtgtctgctcctgcttgtggatgatgctactcatatcccaagcggaggcagccttagagaacctcatagtactcaatgcagcatctctggccgggacgcaaggtcttgtatctttcctcgtgttcttctgctttgcgtggtacctgaagggtaggtgggtgcccggagtggcctacgccctctacgggatgtggccctcctcctgctcctgttggcgttgccccagcgggcatacgcgttggacacggaggtggccgcgtcgtgtggcggtgctgtcctcgtcgggttaatggcgctgactctgtcaccatattacaagcactatatcagctggtgcttgtggtggcttcagtattttctgaccagagtagaagcgcagctgcacgtgtgggttccccccctcaacgttcgagggggcgtgacgccatcatcttactcatgtgtgccgtacacccgactctggtatttgacatctccaaactactgctggctgtcttcgggcccctctggattcttcaagccagtttgcttaaagtaccctactttgtgcgcgtccaaggccttctccgggtctgcgcgctagcgcggaagatggctggaggtcattacgtgcaaatggctatcatcaagttggggcgcttactggcacctatattttcaatcatctcactcctcttcgggactgggcgcacaacggcctacgtgatctggccgtggccgtagaaccagtcaccttctcccaaatggagaccaagctcatcacgtggggggcggacactgccgcctgcggtgacatcatcaacggcttgcccgtctccgcccgtaggggccgggagatattgcttgggccgccgatgggatggtctccaaggggtggaggctgctggcacccatcacggcatacgcccagcagacgaggggccttctagggtgtataatcaccagcttaactggccgggacaagaaccaagtggagggtgaggtccagattatatcaactgccactcaaactttcttggcaacgtgcatcaatggggtatgctggactgtctaccacggggccggaacaggaccatcgcatcacccaagggtcctgtcattcagatgtataccaatgtagaccaagaccttgtgggttggcccgccccttcaggtgcccgctcgttgacgccctgcacttgcggctcctcggacctttacctggtcacgaggcacgccgatgtcattcccgtgcgccggcggggtgatagcaggggcagcctgctttcgccccggcccatttcctattgaaaggctcctcggggggtccactgttgtgccccgcggggcacgccgtgggcatatttagggccgcggtgtgcacccgtggagtggctaaggcggtggacttcatccccgtggagaacctagagacaaccatgaggtccccggtgttcacggacaactcctctccaccagcagtgccccagagcttccaggtggcccacctgcatgctcccacaggagcggcaagagcaccaaggtcccggctgcgtacgcagctcagggctataaggtgctagtgctcaacccctctgttgccgcaacactgggctttggtgcctacatgtccaaggcccacgggatcgagcctaacatcaggaccggggtgagaacaattaccactggcagccccatcacgtactccacctacggtaagttccttgccgacggcgggtgctcgggggcgcttatgacataataatttgtgacgagtgccactccacggatgccacatccatcttgggcatcggcactgtccttgatcaggcagagaccgcgggggcgagactggtcgtgctcgccaccgctacccctccgggctccgtcaccgtgccccatcccaacatcgaggaggttgctctgtccaccaccggagagatccctttttacggcaaggcatccccctcgacgcaatcaagggggggaggcatctcatcttctgtcactcaaaaaagaagtgcgacgagctcgccgcaaaactggtcgcattgggcgttaatgccgtggcctactaccgcggtcttgacgtgtctgtcatcccgaccagcggcgacgttgtcgtcgtggcaaccgatgctctcatgaccggctatactggcgacttcgattcggtgatgactgtaacacgtgtgtcacccagacagtcgatttcagccttgaccctacctttaccatcgagacaaccacgcttccccaggacgctgtctcccgcactcaacgtcggggcaggactggcagggggaagccaggcatctacagatttgtggcaccgggagagcgcccctccggcatgttcgactcgtccgtcctctgtgagtgctatgacgcaggctggcttggtatgagctcacgcccgctgagactacagttaggctacgagcgtacatgaacaccccggggctccccgtgtgccaagaccatcttgaattttgggagggcgtctttacaggtctcactcacatagacgcccacttcctatcccagacaaagcagagtggggagaaccttccttacctggtagcgtaccaagccaccgtgtgcgctagggctcagcccctcccccatcgtgggaccagatgtggaaatgtttgacccgcctcaagcccactctccatggaccaacgcccctgctatacagactgggcgctgtgcagaatgaggtcaccctgacgcatccagtcaccaaatacatcatgacatgca

SEQ ID NO: 757 - DNA, 4856 bp, Hepatitis C virus
gcggtcagatcgttggtggagtttacttgttgccgcgcaggggccctagattgggtgtgcgcgcgacgaggaagacttccgagcggtcgcaacctcgaggtagacgtcagcctatccccaaggcacgcggcccgagggcaggacctgggctcagcccgggtatcctaggcccctctatggcaatgagggctgcgggtgggcgggatggctcctgtctccccgcggctctcggcctagttggggccccacggacccccggcgtaggtcgcgcaatttgggtaaggtcatcgatacccttacgtgcggcttcgccgacctcatggggtacataccgctcgtcggcgccctctcggaggcgctgccagggccctggcgcatggcgtccgggtcctggaagacggcgtgaactatgcaacagggaatcttcctggttgctctttctctatcttcctcctggccctgctctcttgtctgaccgtgcccgcttcagcctaccaagtgcgcaactccacggggctctaccatgtcaccaatgattgccctaattcgagtattgtgttcgagcgcacgatgttatcctgcacactccggggtgtgtcccttgcgttcgcgagggtaacgtctcgaggtgctgggtggcgctgacccccacggtggccaccagggatggcaacttccccgcgacgcaaattcgacgtcacatcgatctgcttgtcgggagtgccaccctttgttcggccctctacgtgggggacctgtgcgggtctgtctttcttatcggcaactgtttaccttctctcccaggcgtcactggacgacgcaagactgcaactgctctatgtatcccggccacataacgggtcaccgcatggcatgggacatgatgatgaactggtctcctacgacggcgttggtagtggctcagctgctccggatcccacaagccatcttggacatgatcgctggtgctcactggggagtcctggcgggcatggcgtattctccatggtggggaactgggcgaaggttctggtagtgctgctgctatttgccggcgtcgacgcggaaacccacgtcaccgggggagctgtcgcccacgccgcgtatgggatccaggctggtctcagtaatttcttcaaggcaggccccaaacagaacatccagctgatcaacaccaacaacagttggcacatcaatcgcacagccttgaactgtaagatagccttgacaccggctggatagcagggcttttctattatcacaatttcaactcttcaggctgtcccgagaggttggccagctgccgacgccttaccgattttagccagggctggggccctatcagtcatgccaacggaagcggccctgaccaacgcccctactgctggcactactccccaaaaccttgcggtgttgtgcccgcgagcaccgtgtgggcccggtatattgcttcactcccagccctgtggtggtgggaacgaccgacagacggggcgcgcccacctacaactggggtgcacgggaggaggacgtcttcgtccttaacaacaccaggccaccgctgggcaattggttcggttgcatctggatgaactcatctggattcaccaaagcttgcggagcgcctccctgcgtcatcggaggggtgggcaaaacaccttgcactgccccactgattgtttccgcaagcacccagaagctacatactctcggtgcggttctggcccctggattacacccaggtgcctggtcaactacccgtataggctttggcactatccttgtaccatcaactacaccttattcaaagtcaggatgtatgtgggaggggtcgagcacaggctggatgctgcttgcaactggacgcgggggaacgttgtgatctggaagacagggacaggtccgagcttagcccgttgttgctgtccactacacagtggcaggtccttccgtgttcattcacgaccctgccagccttgtccaccggcctcatccacctccaccagaacatcgtggacgtgcagtacctctacggggtggggtcaagcatcgtgtcctgggccatcaagtgggagtacgtcgttctcctttccttctgcttgcagatgcacgtgtctgctcctgcttgtggatgatgctactcatatcccaagcggaggcagccttagagaacctcatagtactcaatgcagcatctctggccgggacgcaaggtcttgtatctttcctcgtgttcttctgctttgcgtggtacctgaagggtaggtgggtgcccggagtggcctacgccctctacgggatgtggccctcctcctgctcctgttggcgttgccccagcgggcatacgcgttggacacggaggtggccgcgtcgtgtggcggtgctgtcctcgtcgggttaatggcgctgactctgtcaccatattacaagcactatatcagctggtgcttgtggtggcttcagtattttctgaccagagtagaagcgcagctgcacgtgtgggttccccccctcaacgttcgagggggcgtgacgccatcatcttactcatgtgtgccgtacacccgactctggtatttgacatctccaaactactgctggctgtcttcgggcccctctggattcttcaagccagtttgcttaaagtaccctactttgtgcgcgtccaaggccttctccgggtctgcgcgctagcgcggaagatggctggaggtcattacgtgcaaatggctatcatcaagttggggcgcttactggcacctatattttcaatcatctcactcctcttcgggactgggcgcacaacggcctacgtgatctggccgtggccgtagaaccagtcaccttctcccaaatggagaccaagctcatcacgtggggggcggacactgccgcctgcggtgacatcatcaacggcttgcccgtctccgcccgtaggggccgggagatattgcttgggccgccgatgggatggtctccaaggggtggaggctgctggcacccatcacggcatacgcccagcagacgaggggccttctagggtgtataatcaccagcttaactggccgggacaagaaccaagtggagggtgaggtccagattatatcaactgccactcaaactttcttggcaacgtgcatcaatggggtatgctggactgtctaccacggggccggaacaggaccatcgcatcacccaagggtcctgtcattcagatgtataccaatgtagaccaagaccttgtgggttggcccgccccttcaggtgcccgctcgttgacgccctgcacttgcggctcctcggacctttacctggtcacgaggcacgccgatgtcattcccgtgcgccggcggggtgatagcaggggcagcctgctttcgccccggcccatttcctattgaaaggctcctcggggggtccactgttgtgccccgcggggcacgccgtgggcatatttagggccgcggtgtgcacccgtggagtggctaaggcggtggacttcatccctgtggagaacctagagacaaccatgaggtccccggtgttcacggacaactcctctccaccagcagtgccccagagcttccaggtggcccacctgcatgctcccacaggagcggcaagagcaccaaggtcccggctgcgtacgcagctcagggctataaggtgctagtgctcaacccctctgttgccgcaacactgggctttggtgcctacatgtccaaggcccacgggatcgagcctaacatcaggaccggggtgagaacaattaccactggcagccccatcacgtactccacctacggtaagttccttgccgacggcgggtgctcgggggcgcttatgacataataatttgtgacgagtgccactccacggatgccacatccatcttgggcatcggcactgtccttgatcaggcagagaccgcgggggcgagactggtcgtgctcgccaccgctacccctccgggctccgtcaccgtgccccatcccaacatcgaggaggttgctctgtccaccaccggagagatccctttttacggcaaggcatccccctcgacgcaatcaagggggggaggcatctcatcttctgtcactcaaaaaagaagtgcgatgagctcgccgcaaaactggtcgcattgggcgttaatgccgtggcctactaccgcggtcttgacgtgtctgtcatcccgaccagcggcgacgttgtcgtcgtggcaaccgatgctctcatgaccggctatactggcgacttcgattcggtgatgactgtaacacgtgtgtcacccagacagtcgatttcagccttgaccctacctttaccatcgagacaaccacgcttccccaggacgctgtctcccgcactcaacgtcggggcaggactggcagggggaagccaggcatctacagatttgtggcaccgggagagcgcccctccggcatgttcgactcgtccgtcctctgtgagtgctatgacgcaggctggcttggtatgagctcacgcccgctgagactacagttaggctacgagcgtacatgaacaccccggggctccccgtgtgccaagaccaccttgaattttgggagggcgtctttacaggtctcactcacatagacgcccacttcctatcccagacaaagcagagtggggagaaccttccttacctggtagcgtaccaagccaccgtgtgcgctagggctcagcccctcccccatcgtgggaccagatgtggaaatgtttgacccgcctcaagcccactctccatggaccaacgcccctgctatacagactgggcgctgtgcagaatgaggtcaccctgacgcatccagtcaccaaatacatcatgacatgca

SEQ ID NO: 758 - DNA, 24 bp, Hepatitis C virus
gcactcttccatctcatcgaactc

SEQ ID NO: 759 - DNA, 23 bp, Hepatitis C virus
tccatctcatcaaargcctcata

SEQ ID NO: 760 - DNA, 21 bp, Hepatitis C virus
ttacttccagatcagctgaca

SEQ ID NO: 761 - DNA, 27 bp, Hepatitis C virus
atgagcacgaatcctaaacctcaaaga

SEQ ID NO: 762 - DNA, 20 bp, Hepatitis C virus
tgggggcgacactccaccat

SEQ ID NO: 763 - DNA, 24 bp, Hepatitis C virus
gcactcttccatctcatcgaactc

SEQ ID NO: 764 - DNA, 30 bp, Hepatitis C virus
tcaaagaaaaaccaaacgtaacaccaaccg

SEQ ID NO: 765 - DNA, 30 bp, Hepatitis C virus
caccatagatcactcccctgtgaggaacta

SEQ ID NO: 766 - DNA, 23 bp, Hepatitis C virus
aggtgctcgtgacgacctccagg

SEQ ID NO: 767 - DNA, 27 bp, Hepatitis C virus
atgagcacaaatcctaaacctcaaaga

SEQ ID NO: 768 - DNA, 23 bp, Hepatitis C virus
tccatctcatcaaargcctcata

SEQ ID NO: 769 - DNA, 27 bp, Hepatitis C virus
aatcctaaacctcaaagaaaaaccaaa

SEQ ID NO: 770 - DNA, 21 bp, Hepatitis C virus
gacctcaaggtcagcttgcat

SEQ ID NO: 771 - DNA, 27 bp, Hepatitis C virus
atgagcacacttcctaaacctcaaaga

SEQ ID NO: 772 - DNA, 21 bp, Hepatitis C virus
ttacttccagatcagctgaca

SEQ ID NO: 773 - DNA, 30 bp, Hepatitis C virus
tcaaagaaaaaccaaaagaaacaccatccg

SEQ ID NO: 774 - DNA, 21 bp, Hepatitis C virus
ttacttccagatcagctgaca

We claim:

1. A method for identifying transmitted hepatitis C virus (HCV) genomes, the method comprising:
(a) collecting a patient sample;
(b) isolating viral RNA from said sample;
(c) sequencing said viral RNA, wherein viral RNA sequencing includes HCV genomes of circulating virus;
(d) performing sequence alignment of selected HCV genome regions;
(e) analyzing phylogenetically selected sequence alignments; and
(f) identifying HCV genomes of transmitted virus.

2. The method of claim 2, the method further comprising: (g) detecting the variation in transmitted viral sequence over time, wherein variations in said viral sequences are identified.

3. The method of claim 1, wherein sequencing of HCV genomes is performed by single genome amplification (SGA).

4. The method of claim 1, wherein phylogenetic analysis is performed by mathematical modeling.

5. The method of claim 1, wherein HCV genomes identified according to the method of claim 1 mediate viral transmission.

6. The method of claim 1, wherein the identified HCV genomes of transmitted virus comprise env and core genes.

7. The method of claim 1, wherein HCV genomes comprise global genotypes.

8. The method of claim 7, wherein HCV genomes further comprise subtypes.

9. The method of claim 1, wherein HCV genomes comprise drug resistant variants.

10. The HCV genomes as identified by the method of claim 1, wherein polynucleotide(s) of circulating HCV genomes comprise SEQ ID NOS: 23-757.

11. The HCV genomes as identified by the method of claim 1, wherein said HCV genomes comprise polynucleotides of Table I.

12. An HCV polynucleotide comprising polynucleotides of Table I, wherein said polynucleotides mediate viral transmission.

13. The HCV polynucleotides of claim 12, wherein the polynucleotides comprise env and core genes.

14. A method of administering a vaccine, the method comprising administering one or more HCV polynucleotides of Table I, wherein a patient immune response is induced.

15. The method of claim 14, wherein one or more polypeptides encoded by a polynucleotide(s) of Table I is administered in the presence or absence of additional polynucleotide(s).
